(19) United States
(12) Patent Application Publication
(10) Pub. No.: US 2012/0003244 A1
(43) Pub. Date: Jan. 5, 2012

(54) METHODS FOR APCDD1 MEDIATED REGULATION OF HAIR GROWTH AND PIGMENTATION AND MUTANTS THEREOF

(76) Inventor: Angela M. Christiano, Saddle River, NJ (US)

(21) Appl. No.: 13/099,044

(22) Filed: May 2, 2011

Related U.S. Application Data
(63) Continuation-in-part of application No. PCT/US09/62970, filed on Nov. 2, 2009.
(60) Provisional application No. 61/110,029, filed on Oct. 31, 2008.

(51) Int. Cl. A61K 39/395; A61K 38/02; C07H 21/02; C07H 21/00; C40B 20/00; A61P 17/00; G01N 33/566; C12Q 1/68; G01N 33/573; G01N 21/64; A61K 31/7088; A61P 17/14

(52) U.S. Cl. 424/172.1; 514/44 A; 514/20.7; 514/44 R; 536/24.5; 536/24.31; 435/7.1; 435/6.13; 435/7.4; 435/6.11; 506/2

(57) ABSTRACT

The invention provides for methods for controlling hair growth by administering an APCDD1 modulating compound to a subject. The invention further provides for a method for screening compounds that bind to and modulate APCDD1.

[0001] This application is a continuation-in-part of International Application No. PCT/US09/62970 filed on Nov. 2, 2009, which claims the benefit of priority of U.S. Ser. No. 61/110,029, filed on Oct. 31, 2008, the contents of each which are hereby incorporated by reference in their entireties.

### GOVERNMENT INTERESTS

[0002] This invention was made with government support under RO1 AR44924 awarded by the National Institutes of Health/National Institute of Arthritis and Musculoskeletal and Skin Diseases. The United States Government has certain rights to the invention.

[0003] All patents, patent applications and publications cited herein are hereby incorporated by reference in their entirety. The disclosures of these publications in their entireties are hereby incorporated by reference into this application.

[0004] This patent disclosure contains material that is subject to copyright protection. The copyright owner has no objection to the facsimile reproduction by anyone of the patent document or the patent disclosure as it appears in the U.S. Patent and Trademark Office patent file or records, but otherwise reserves any and all copyright rights.

### SEQUENCE LISTING

[0005] The instant application contains a Sequence Listing which has been submitted via EFS-Web and is hereby incorporated by reference in its entirety. Said ASCII copy, created on Nov. 25, 2009, is named 19240785.txt, and is 2,404,261 bytes in size.

### BACKGROUND OF THE INVENTION

[0006] Hereditary hypotrichosis simplex (HHS; OMIM 146520/605389) is an isolated form of hair loss. HHS is a rare autosomal dominant form of hereditary hair loss characterized by hair follicle (HF) miniaturization. APCDD1 (adenomatosis polyposis coli down-regulated 1) is a gene assigned at chromosomal band 18p11.2. It is a direct target of the WNT/β-catenin signaling pathway and has been identified to be over-expressed in certain cancers.

### SUMMARY OF THE INVENTION

[0007] The invention provides for an isolated mutant human APCDD1 polypeptide, methods for controlling hair growth by administering an APCDD1 modulating compound to a subject, and methods for screening compounds that bind to and modulate APCDD1. The invention also provides for diagnostic kits that can detect the presence of an aberrant APCDD1 protein.

[0008] One aspect of the invention provides for an isolated mutant human APCDD1 polypeptide comprising at least 1 amino acid mutation in SEQ ID NO: 1. In one embodiment, the mutation is a Leucine to Arginine mutation at amino acid position 9 of SEQ ID NO: 1, comprising the amino acid sequence of SEQ ID NO: 5.

[0009] One aspect of the invention also provides for an isolated mutant human APCDD1 polypeptide encoded by a nucleic acid sequence comprising at least about 70% identity, at least about 75% identity, at least about 80% identity, at least about 85% identity, at least about 90% identity, at least about 95% identity, or at least about 99% identity of SEQ ID NO: 2. In one embodiment, the nucleic acid sequence comprises the nucleic acid sequence of SEQ ID NO: 6.

[0010] An aspect of the invention provides for a nucleic acid encoding the polypeptide of the isolated mutant human APCDD1 of SEQ ID NO: 5 as well as for a vector that encodes the nucleic acid described herein.

[0011] One aspect of the invention provides methods for controlling hair growth in a subject, where the method comprises administering to the subject an effective amount of an APCDD1 modulating compound, thereby controlling hair growth in the subject. In one embodiment, controlling hair growth comprises an induction of hair growth in the subject or a promotion of hair loss in the subject. In one embodiment, the compound comprises an antibody that specifically binds to an APCDD1 protein or a fragment thereof; an antisense RNA or antisense DNA that inhibits expression of an APCDD1 polypeptide; a siRNA that specifically targets an APCDD1 gene; or a combination of those described herein. In another embodiment, the compound comprises a peptide comprising at least about 10 amino acids of SEQ ID NO: 1 or a vector comprising a nucleic acid sequence encoding a polypeptide comprising SEQ ID NO: 1. In a further embodiment, the subject is a human, a primate, a feline, a canine, or an equine. In some embodiments, the subject is afflicted with hypotrichosis. In other embodiments, the subject is afflicted with a hair-loss disorder. Non-limiting examples of the hair-loss disorder include androgenetic alopecia, Telogen effluvium, Alopecia greata, telogen effluvium, Alopecia greata, Tinea capitis, alopecia totalis, hypotrichosis, hereditary hypotrichosis simplex, or alopecia universalis. In further embodiments, the subject is afflicted with hypertrichosis. In other embodiments, administering comprises dispersing the APCDD1 modulating compound to a subject via subcutaneous, intradermal, intramuscular, intra-peritoneal, or intravenous injection; infusion; oral, nasal, or topical delivery; or a combination thereof; while in some embodiments, administering comprises dispersing the APCDD1 modulating compound to an epithelial cell derived from a hair follicle or skin. In some embodiments, hair growth can be regulated by modulating an APCDD1 target gene or APCDD1 interacting partner gene. Non-limiting examples of APCDD1 target genes or interacting partner genes include angiotensin receptor-related protein 1b (apelin receptor, agrtl 1b), foxi1-ema/Xema/Foxi1/HNF-3, histone 3r, polo-like kinase 2 (plk2), cyclin G1 (ccng1), PARP3-poly (ADP-ribose) polymerase family-member 3, haeme peroxidase E3 ubiquitin-protein ligase-Ring finger, ras-like 11b (rasl11b), Histone 2B, 5′-nucleotidase, cytosolic III (cytosolic 5′-nucleotidase III), angiotensin receptor-related protein 1 (agtrl1; e.g., XAngio1 in Xenopus), RAB40B, Histone 2, LRP5, WNT3A, and FGF receptor 2.

[0012] An aspect of the invention also provides for methods for controlling loss of hair pigmentation in a subject. The method comprises administering to the subject an effective amount of an APCDD1 modulating compound, thereby controlling hair pigmentation in the subject. In one embodiment, the compound comprises an antibody that specifically binds to an APCDD1 protein or a fragment thereof; an antisense RNA or antisense DNA that inhibits expression of an APCDD1 polypeptide; a siRNA that specifically targets an APCDD1 gene; or a combination of those described herein. In another embodiment, the compound comprises a peptide comprising at least about 10 amino acids of SEQ ID NO: 1 or a vector comprising a nucleic acid sequence encoding a polypeptide comprising SEQ ID NO: 1. In a further embodiment, the subject is a human, a primate, a feline, a canine, or an equine. In some embodiments, the subject is afflicted with hypotrichosis. In other embodiments, the subject is afflicted with a hair-loss disorder. Non-limiting examples of the hair-loss disorder include androgenetic alopecia, Telogen effluvium, Alopecia greata, telogen effluvium, Alopecia greata, Tinea capitis, alopecia totalis, hypotrichosis, hereditary hypotrichosis simplex, or alopecia universalis. In further embodiments, the subject is afflicted with hypertrichosis. In other embodiments, administering comprises dispersing the APCDD1 modulating compound to a subject via subcutaneous, intradermal, intramuscular, intra-peritoneal, or intravenous injection; infusion; oral, nasal, or topical delivery; or a combination thereof; while in some embodiments, administering comprises dispersing the APCDD1 modulating compound to an epithelial cell derived from a hair follicle or skin. In some embodiments, hair loss can be controlled by modulating an APCDD1 target gene or APCDD1 interacting partner gene. Non-limiting examples of APCDD1 target genes or interacting partner genes include angiotensin receptor-related protein 1b (apelin receptor, agrtl 1b), foxi1-ema/Xema/Foxi1/HNF-3, histone 3r, polo-like kinase 2 (plk2), cyclin G1 (ccng 1), PARP3-poly (ADP-ribose) polymerase family-member 3, haeme peroxidase E3 ubiquitin-protein ligase-Ring finger, ras-like 11b (rasl11b), Histone 2B, 5′-nucleotidase, cytosolic III (cytosolic 5′-nucleotidase III), angiotensin receptor-related protein 1 (agtrl1; e.g., XAngio1 in Xenopus), RAB40B, Histone 2, LRP5, WNT3A, and FGF receptor 2.

[0013] One aspect of the invention also provides for a composition for modulating APCDD1 protein expression or activity in a subject in need thereof, wherein the composition comprises an siRNA that specifically targets an APCDD1 gene. In one embodiment, the siRNA comprises a nucleic acid sequence comprising any one sequence of SEQ ID NO: 112-3776. In another embodiment, APCDD1 protein expression is decreased by at least about 40%, at least about 45%, at least about 50%, at least about 55%, at least about 60%, at least about 65%, at least about 70%, at least about 75%, at least about 80%, at least about 90%, at least about 95%, at least about 99%, or 100%. In a further embodiment, APCDD1 protein expression is increased by at least about 40%, at least about 45%, at least about 50%, at least about 55%, at least about 60%, at least about 65%, at least about 70%, at least about 75%, at least about 80%, at least about 90%, at least about 95%, at least about 99%, or 100%. In other embodiments, the subject is a human, a primate, a feline, a canine, or an equine. In further embodiments, the subject is afflicted with hypotrichosis; while in some embodiments, the subject is afflicted with a hair-loss disorder. Non-limiting examples of the hair-loss disorder includes androgenetic alopecia, Alopecia greata, telogen effluvium, Alopecia greata, alopecia totalis, or alopecia universalis. Yet, in some embodiments, the subject is afflicted with hypertrichosis.

[0014] An aspect of the composition for controlling hair growth or loss of hair pigmentation in a subject, the composition in an admixture of a pharmaceutically acceptable carrier comprising an APCDD1 modulating compound. In one embodiment, the pharmaceutically acceptable carrier comprises water, a glycol, an ester, an alcohol, a lipid, or a combination of the carriers described herein. In another embodiment, hair growth comprises an induction of hair growth in the subject or a promotion of hair loss in the subject. In a further embodiment, the compound comprises an antibody that specifically binds to an APCDD1 protein or a fragment thereof; an antisense RNA or antisense DNA that inhibits expression of an APCDD1 polypeptide; a siRNA that specifically targets an APCDD1 gene; or a combination thereof. In some embodiments, the compound comprises a peptide comprising at least about 10 amino acids of SEQ ID NO: 1 or a vector comprising a nucleic acid sequence encoding a polypeptide comprising SEQ ID NO: 1. In other embodiments, the subject is a human, a primate, a feline, a canine, or an equine. In further embodiments, the subject is afflicted with hypotrichosis; while in some embodiments, the subject is afflicted with a hair-loss disorder. Non-limiting examples of the hair-loss disorder includes androgenetic alopecia, Alopecia greata, telogen effluvium, Alopecia greata, alopecia totalis, or alopecia universalis. Yet, in some embodiments, the subject is afflicted with hypertrichosis.

[0015] An aspect of the invention provides for a kit for controlling hair growth. The kit comprises a container having a composition described above disposed within the kit and instructions for use.

[0016] An aspect of the invention also provides a method for identifying a compound that modulates APCDD1 protein activity. The method comprises (1) expressing APCDD1 protein in a cell; (2) contacting a cell with a ligand source for an effective period of time; (3) measuring a secondary messenger response, wherein the response is indicative of a ligand binding to APCDD1 protein; (4) isolating the ligand from the ligand source; and (5) identifying the structure of the ligand that binds APCDD1 protein, thereby identifying which compound would modulate the activity of APCDD1 protein. In one embodiment, the method further comprises (i) obtaining or synthesizing the compound determined to bind to APCDD1 protein or to modulate APCDD1 protein activity; (ii) contacting APCDD1 protein with the compound under a condition suitable for binding; and (iii) determining whether the compound modulates APCDD1 protein activity using a diagnostic assay. In another embodiment, the compound is an APCDD1 agonist or an APCDD1 antagonist. In a further embodiment, the antagonist decreases APCDD1 protein or RNA expression or APCDD1 activity by at least about 10%, at least about 20%, at least about 30%, at least about 40%, at least about 50%, at least about 60%, at least about 70%, at least about 75%, at least about 80%, at least about 90%, at least about 95%, or at least about 99%. In some embodiments, the antagonist decreases APCDD1 protein or RNA expression or APCDD1 activity by 100%. In other embodiments, the agonist increases APCDD1 protein or RNA expression or APCDD1 activity by at least about 10%, at least about 20%; at least about 30%, at least about 40%, at least about 50%, at least about 60%, at least about 70%, at least about 75%, at least about 80%, at least about 90%, at least about 95%, or at least about 99%. In some embodiments, the agonist increases APCDD1 protein or RNA expression or APCDD1 activity by 100%. In further embodiments, the compound comprises an antibody that specifically binds to an APCDD1 protein or a fragment thereof; an antisense RNA or antisense DNA that inhibits expression of an APCDD1 polypeptide; a siRNA that specifically targets an APCDD1 gene, a peptide comprising at least 10 amino acids of SEQ ID NO: 1 wherein the peptide competes with endogenous APCDD1 for ligand binding; or a combination of such. In yet, some embodiments, the cell is a bacterium, a yeast, an insect cell, or a mammalian cell. In one embodiment, the ligand source is a compound library or a tissue extract. In other embodiments, measuring comprises detecting an increase or decease in a secondary messenger concentration; while in some embodiments, the assay determines the concentration of the secondary messenger within the cell. Non-limiting examples of the secondary messenger include glycogen synthase kinase 3β (GSK3β), β-catenin, adenomatous polyposis coli (APC), axin, or a combination thereof. In one embodiment, contacting comprises administering the compound to a mammal in vivo or a cell in vitro. In another embodiment, the mammal is a mouse. In a further embodiment, the compound increases or decreases downstream signaling of the APCDD1 protein. Yet in other embodiments, the assay measures an intracellular concentration of glycogen synthase kinase 3β (GSK3β), β-catenin, adenomatous polyposis coli (APC), or axin. In some embodiments, the assay measures LEF/TCF transcription, while in other embodiments the assay measures β-catenin phosphorylation or β-catenin nuclear translocation.

[0017] An aspect of the invention provides a method for detecting the presence of or a predisposition to a hair-loss disorder in a human subject. The method comprises (1) obtaining a biological sample from a human subject; and (2) detecting whether or not there is an alteration in the expression of APCDD1 protein in the subject as compared to a subject not afflicted with a hair-loss disorder. In one embodiment, the detecting comprises detecting whether there is an alteration in the APCDD1 gene locus. In another embodiment, the alteration comprises a missense mutation. In a further embodiment, the mutation is thymine to guanine substitution at position 26 of SEQ ID NO: 2. In some embodiments, the detecting comprises detecting whether a small nuclear polymorphism (SNP) is present in the APCDD1 gene locus, while in other embodiments, the SNP comprises a single nucleotide change, or a cluster of SNPs in and around the APCDD1 gene, or other SNPS that are in linkage disequilibrium (LD) with APCDD1. In further embodiments, the detecting comprises detecting whether at least a portion of the APCDD1 gene is deleted. In yet other embodiments, the detecting comprises detecting whether the signal peptide sequence of the APCDD1 protein is altered. In some embodiments, the detecting comprises detecting whether there is an alteration in the APCDD1 protein. In other embodiments, the alteration comprises a Leucine to Arginine substitution at amino acid position 9 of SEQ ID NO: 1. In some embodiments, the detecting comprises detecting whether expression of APCDD1 is reduced, while in other embodiments, the detecting comprises detecting in the sample whether there is a reduction in APCDD1 mRNA, APCDD1 protein, or a combination thereof. In some further embodiments, detecting comprises gene sequencing, selective hybridization, amplification, gene expression analysis, or a combination of the methods described. In one embodiment, amplification comprises using forward and reverse RT-PCR primers comprising nucleotide sequences of SEQ ID NOS: 9, 10, 13, 14, 57, or 103. In another embodiment, the subject is a human, a dog, or a mouse. In a further embodiment, the sample comprises blood, serum, sputum, lacrimal secretions, semen, vaginal secretions, fetal tissue, skin tissue, epithelial tissue, muscle tissue, amniotic fluid, or a combination of the samples described. In some embodiments, a reduction in APCDD1 expression of at least 20% indicates a predisposition to or presence of a hair-loss disorder in the subject. In further embodiments of the invention, the hair-loss disorder comprises androgenetic alopecia, Alopecia greata, telogen effluvium, Alopecia greata, alopecia totalis, hypotrichosis, hereditary hypotrichosis simplex, or alopecia universalis. In some embodiments, detecting the presence of or a predisposition to a hair-loss disorder in a human subject occurs by detecting the upregulation or downregulation of the expression of one or more proteins encoded by an APCDD1 target gene or APCDD1 interacting partner gene, either alone or in combination with detecting whether there is an alteration in the expression of the APCDD1 protein. Non-limiting examples of APCDD1 target genes or interacting partner genes include angiotensin receptor-related protein 1b (apelin receptor, agrtl 1b), foxi1-ema/Xema/Foxi1/HNF-3, histone 3r, polo-like kinase 2 (plk2), cyclin G1 (ccng1), PARP3-poly (ADP-ribose) polymerase family-member 3, haeme peroxidase E3 ubiquitin-protein ligase-Ring finger, ras-like 11b (rasl11b), Histone 2B, 5′-nucleotidase, cytosolic III (cytosolic 5′-nucleotidase III), angiotensin receptor-related protein 1 (agtrl1; e.g., XAngio1 in Xenopus), RAB40B, Histone 2, LRP5, WNT3A, and FGF receptor 2.

[0018] An aspect of the invention provides a diagnostic kit for determining whether a sample from a subject exhibits reduced APCDD1 expression or exhibits an APCDD1 gene mutation. The kit comprises nucleic acid primers that specifically hybridize to and can prime a polymerase reaction from APCDD1. In one embodiment, the primers comprise a nucleotide sequence of SEQ ID NOS: 9, 10, 13, 14, 21, 22, 23, 24, 25, 67, 68, 69, 70, or 71. In another embodiment, the mutation comprises a Leucine to Arginine substitution at amino acid position 9 of SEQ ID NO: 1.

### BRIEF DESCRIPTION OF THE FIGURES

[0019] To conform to the requirements for U.S. patent applications, many of the figures presented herein are black and white representations of images originally created in color, such as many of those figures based on immunofluorescence microscopy, e.g., DAPI (blue) staining and APCDD1 staining in green. In the below descriptions and the examples, this colored staining is described in terms of its appearance in black and white. For example, DAPI staining which appeared blue in the original appears as a dark grey stain when presented in black and white. The original color versions can be viewed in Shimomura et al., Nature 2010 (Apr. 15), 464(7291):1043-7 (including the accompanying Supplementary Information available in the on-line version of the manuscript available on the Nature Genetics web site). For the purposes of the U.S., the contents of Shimomura et al., Nature 2010 (Apr. 15), 464(7291):1043-7, including the accompanying “Supplementary Information,” are herein incorporated by reference.

[0020] FIGS. 1A-F are photographs showing the clinical appearance of hereditary hypotrichosis simplex (HHS). The age of each individual is 7 (FIG. 1A), 3 (FIG. 1B), 10 (FIG. 1C), 28 (FIG. 1D), 20 (FIG. 1E), and 16 (FIG. 1F) years old, respectively

[0021] FIG. 1G is a bar graph depicting the results of autozygosity, fine mapping of HHS phenotype on chromosome 18p11.2. The maximum LOD score was obtained for a region on chromosome 18.

[0022] FIG. 1H represents haplotype analysis of a Pakistani family HHS1. The linked haplotype is indicated in red, and critical recombination events are indicated by an arrowhead.

[0023] FIG. 2A is a schematic representation of the candidate region harboring the HHS gene. Arrows indicate the position and the direction of transcription of genes in the region.

[0024] FIG. 2B is a DNA chromatogram identifying a mutation in the APCDD1 gene. A heterozygous 26T>G (L9R) mutation in the APCDD1 gene of both families HHS1 and HHS2 was observed [left panel, SEQ ID NO: 9737, amino acid sequence disclosed as SEQ ID NO: 9771; right panel (control), SEQ ID NO: 9738, amino acid sequence disclosed as SEQ ID NO: 9772]. Screening assays with the restriction enzyme DdeI in HHS1 are shown below the chromatograms as a gel image. The 191 bp fragment only from the wild-type allele was digested into 149 bp and 42 bp fragments.

[0025] FIG. 2C is a photographic image of a western blot. Tagged vs. untagged SWAMP wt and mutant was compared. Animal caps were injected with 1 ng RNA of each of the indicated molecules, and 1 ng LacZ RNA as control for amount of injected RNA. Western blot with antibodies against SWAMP (1:10,000) and β-Galactosidase (1:1000, ProScience Inc.). The HA tag stabilizes the L9R mutant, but has no effect on the wt molecule.

[0026] FIG. 3A is a schematic representation of APCDD1 protein and position of the mutation L9R.

[0027] FIG. 3B is a multiple amino-acid sequence alignment of the signal peptide sequences of APCDD1 between different species. Residues that are conserved among at least five species are colored yellow. The Leu9 is denoted as “Leu 9”. The accession numbers of GenBank or Ensembl databases for the respective APCDD1 proteins are: Homo sapiens, NP_{—}694545 [SEQ ID NO: 9750]; Equus caballus, ENSECAP00000009668 [SEQ ID NO: 9751]; Canis familiaris, XP_{—}537333 [SEQ ID NO: 9752]; Mus musculus, NP_{—}573500 [SEQ ID NO: 9753]; Myotis lucifugus, ENSMLUP00000001735 [SEQ ID NO: 9754]; Gallus gallus, ENSGALP00000001313 [SEQ ID NO: 9755]; Pelodiscus sinensis, BAD74115 [SEQ ID NO: 9756]; Xenopus laevis, BAE02564 [SEQ ID NO: 9757].

[0028] FIG. 3C is a photograph of a western blot analysis of cell lysates and medium from HEK293T cells that APCDD1 expression constructs were transfected. Strong expression of the wild-type L9V mutant APCDD1 was detected in both cell lysate and medium (lanes 1 and 3), whereas that of the L9R mutant APCDD1 was weakly detected only in cell lysate (lane 2). When the L9R mutant APCDD1 expression construct was co-transfected with the wild-type construct, the expression of the wild-type protein was significantly decreased (lane 6). Beta-actin was used as a normalization control in cell lysate, and also as a control to deny the contamination of cell lysate in medium.

[0029] FIGS. 3D-G are photographs of indirect immunofluorescence analysis in HEK293T cells.

[0030] FIG. 4A is a photograph of a northern blot analysis showing APCDD1 expression in the human hair follicles. RT-PCR amplification of the APCDD1 mRNA is shown from plucked human hair follicles. MWM, molecular weight marker.

[0031] FIG. 4B is a photograph of semiquantitative RT-PCR showing that the APCDD1 expression immediately decreased upon explant culture.

[0032] FIGS. 4C-D are photographs of in situ hybridization. Antisense probe (AS) detected the strong signals in the dermal papilla, the matrix, and the precortex of the human hair follicles (FIG. 4C), while sense probe (S) did not show any positive signals (FIG. 4D).

[0033] FIGS. 4E-J are photographs of indirect immunofluorescence. APCDD1 protein is abundantly expressed in the dermal papilla (DP), the matrix (Mx), the hair shaft cortex (HSCx), hair shaft cuticle (HSCu), and weakly in the inner root sheath (IRS) of the human hair follicles (FIGS. 4E-F). Double immunostaining of APCDD1 with an inner root sheath (IRS)-specific marker K71 confirmed that APCDD1 is expressed in the IRS as well (FIGS. 4G-I). In the upper portion of the hair follicles, APCDD1-expression is detected in the outer root sheath (ORS) and the sebaceous gland (SG)(FIG. 4J). Scale bars: 100 μm.

[0034] FIGS. 5A-F are photographs of the clinical appearance of affected individuals in the Pakistani families HHS1 (FIGS. 5A and 5B) and HHS2 (FIGS. 5C-F). The age of each individual is 2 (FIG. 5A), 6 (FIG. 5B), 8 (FIG. 5C), 9 (FIG. 5D), 12 (FIG. 5E), and 20 (FIG. 5F) years old, respectively.

[0035] FIGS. 5G-I are photographs of plucked hair shafts of affected individuals. Scale bars: 100 μm. FIG. 5J is a photograph of the clinical appearance of an affected individual in the Pakistani family HHS1. The age of the individual is 28.

[0036] FIG. 6 represents haplotype analysis of the Pakistani family HHS2 for the mutation L9R in the APCDD1 gene (TOP). The linked haplotype is indicated in red, and critical recombination events are indicated by an arrowhead. The disease-related haplotype and affected individuals are colored in red. Screening assays with a restriction enzyme in HHS2 are shown below the pedigree as a gel image. PCR product from wild-type allele, 191 bp in size, was digested into 149 bp and 42 bp fragments, while that from the mutant allele was undigested. MWM, molecular weight markers; C, control individual.

[0037] FIGS. 7A-E shows an Italian family with HHS. FIG. 7A depicts a pedigree of an Italian family with HHS, while FIGS. 7B-E are photographic images of the clinical appearance of affected individuals. Scale bars: 100 μm

[0038] FIG. 7F is a schematic of the candidate region for the Italian family that was defined previously³. Candidate region that was defined in Pakistani families, as well as the position of APCDD1 gene, are also shown.

[0039] FIG. 7G is a DNA chromatogram showing the identification of a heterozygous 26T>G (L9R) mutation in the APCDD1 gene in the Italian family [SEQ ID NO: 9758, amino acid sequence disclosed as SEQ ID NO: 9773].

[0040] FIG. 8 is a comparison of haplotypes between three families with an identical point mutation in the APCDD1 gene. The marker APCDD1-MS is located within intron 1 of the APCDD1 gene, which is only 5 Kb distant from the position of the mutation. Note that the three families had a distinct disease-related haplotype, suggesting that the mutation arose independently in each family, and that nucleotide 26 of the SWAMP gene may be a mutational hotspot.

[0041] FIG. 9 is a multiple amino acid sequence alignment of APCDD1 protein between different species. N-terminal signal peptide and C-terminal transmembrane sequences are boxed in red and black, respectively. Conserved residues among at least 6 species are indicated by asterisks. The Leu9 is indicated in blue and a black circle. Highly conserved cysteine residues are indicated by black arrowheads and highlighted in yellow. The accession numbers of GenBank or Ensembl databases for the respective APCDD1 proteins are: Homo sapiens, NP_{—}694545 [SEQ ID NO. 9759]; Equus caballus, ENSECAP00000009668 [SEQ ID NO. 9760]; Canis familiaris, XP_{—}537333 [SEQ ID NO. 9761]; Mus musculus, NP_{—}573500 [SEQ ID NO. 9762]; Myotis lucifugus, ENSMLUP00000001735 [SEQ ID NO. 9763]; Gallus gallus, ENSGALP00000001313 [SEQ ID NO. 9764]; Pelodiscus sinensis, BAD74115 [SEQ ID NO. 9765]; Xenopus tropicalis, ENSXETP00000056413 [SEQ ID NO. 9766]; Danio rerio, ENSDARP00000081410 [SEQ ID NO. 9767]; Ciona intestinalis, ENSCINP00000022338 [SEQ ID NO. 9768].

[0042] FIG. 10 are graphs depicting the prediction of the signal peptide of APCDD1 protein. The N-terminal signal peptide sequences of the wild-type (FIG. 10A) and the L9R mutant (FIG. 10B) APCDD1 protein was analyzed using the SignalP-HMM program (version 3.0; www.cbs.dtu.dk/services/SignalP/). The predicted hydrophobic core sequences are boxed in FIG. 10A [SEQ ID NO. 9769] and FIG. 10B [SEQ ID NO. 9770]. The amino acid poison 9 is indicated by red arrowheads.

[0043] FIG. 11 are images of western blots carried out to analyze APCDD1 protein. FIG. 11A depicts wild-type APCDD1 protein that was digested with PNGase F. FIG. 11B represents an immunoprecipitation experiment. Total cell lysates were immunoprecipitated with anti-c-myc antibody, which was followed by western blot with anti-HA antibody. 55 KDa fragment corresponds to the heavy chain of IgG.

[0044] FIG. 12 are images of western blots carried out to analyze APCDD1 expression in three different cell lines. Expression of APCDD1 protein in cell lysates from HEK293T (Left Panel), CHO (Center Panel), and primary human dermal fibroblast (Right Panel) was analyzed by western blots with anti-HA antibody. When the L9R mutant APCDD1 expression construct was co-transfected with the wild-type construct, the expression of the wild-type protein was markedly decreased in HEK293T cells.

[0045] FIG. 13. is a bar graph depicting that APCDD1 expression significantly decreases in cultured dermal papilla (DP) cells. The expression levels of APCDD1-mRNA between fresh and cultured (passages 0, 1, 3 and 5) DP cells were analyzed by real-time PCR. Relative RNA levels are shown as compared with the expression level in P5 cells.

[0046] FIG. 14. are images of western blots with a mouse polyclonal anti-APCDD1 antibody. In total cell lysates from human scalp skin, two fragments around 58 and 130 KDa in size, were detected, which is similar patterns with the HA-tagged wild-type APCDD1 overexpressed in HEK293T cells. The anti-APCDD1 antibody also showed a fragment in medium of wild-type APCDD1 construct-transfected cells (bottom panel).

[0047] FIG. 15 are photomicrographs of human hair follicles (HFs). FIG. 15A shows In situ hybridization with SWAMP (APCDD1) antisense mRNA probe in human HFs. SWAMP is present in the dermal papilla (DP), the matrix (Mx), the hair shaft cortex (HSCx), and the hair shaft cuticle (HSCu) of the human hair follicles, while the sense probe did not show any signal. FIGS. 15B-E are images of Indirect immunofluorescence in human HFs using a mouse polyclonal anti-APCDD1 antibody (Abnova). The expression of SWAMP protein in the HSCx (boxed with dotted line in FIG. 15B overlaps with that of E- and P-cadherin proteins (FIGS. 15C-E). Counterstaining with DAPI is shown in blue (FIGS. 15B, 15E). Scale bars: 100 μm (FIGS. 15A-B), 20 μm (FIG. 15C).

[0048] FIG. 16 is a schematic of the mechanism of action of wild-type and L9R mutant SWAMP (APCDD1). Wild type (Wt) SWAMP is processed in the ER and localized at the cell membrane, which inhibits Wnt signaling through interacting with WNT and LRP proteins (FIG. 16A). By contrast, when Wt-SWAMP co-expresses with L9R-SWAMP, Wt-SWAMP is forced to be retained and degraded in the ER, which is predicted to result in upregulation of Wnt signaling (FIG. 16B).

[0049] FIG. 17 is photographic images of RNA blots showing that SWAMP (APCDD1) mRNA is expressed in human scalp skin. FIG. 17A shows RT-PCR amplification of SWAMP mRNA from human scalp skin. Note that SWAMP-mRNA was amplified, while its homologue APCDD1L-mRNA was not. FIG. 17B shows RT-PCR using total RNA from human plucked hairs shows the expression of LRP5 and WNT3A in human hair follicles. MWM, molecular weight markers (FIGS. 17A, 17B).

[0050] FIG. 18 is photographic images of western blots showing that SWAMP (APCDD1) is binds with LRP5 and WNT3A in vitro. FIG. 18A demonstrates co-immunoprecipitation assays in HEK293T cells. HA-tagged extracellular domain of SWAMP protein (SWAMP-ΔTM-HA) was co-immunoprecipitated with the Flag-tagged extracellular domain of LRP5 (LRP5-EC-Flag; left panel). Flag-tagged extracellular domain of SWAMP protein (SWAMP-ΔTM-Flag) was co-immunoprecipitated with the HA-tagged WNT3A (WNT3A-HA), but not with the HA-tagged extracellular domain of CD40 (CD40-EC-HA; right panel). FIG. 18B depicts GST-pulldown assays. N-terminal GST fusion protein for extracellular domain of SWAMP (GST-SWAMP-ΔTM) was generated in bacteria, and was purified with glutathione-Sepharose beads (left panel). The purified GST-SWAMP-ΔTM was incubated with lysates of HEK293T cells overexpressing LRP5-EC-Flag, WNT3A-HA, or CD40-EC-HA, and was analyzed by western blots with mouse monoclonal anti-Flag-M2 (1:1,000; Sigma) or rabbit polyclonal anti-HA (1:4,000; Abcam) antibodies. The GST-SWAMP-ΔTM showed an affinity with LRP5-EC-Flag and WNT3A-HA, but not with CD40-EC-HA (right panels). CD40 is a Wnt signaling-unrelated single-pass transmembrane protein, and was used as a negative control (FIGS. 18A-18B).

[0051] FIGS. 19A-C are photographs of western blots demonstrating the characterization of the SWAMP (APCDD1) protein. FIG. 19A is a western blot of cell lysates from HA-tagged wild-type SWAMP-expressing HEK293T cells were treated with N-glycosidase (PNGase F). The 68 KDa fragment was clearly digested into a 53 KDa fragment with PNGase F, suggesting that the SWAMP protein undergoes N-glycosylation. FIG. 19B is a western blot of equal amounts of cell lysate from HA-tagged wild-type SWAMP-expressing HEK293T cells were separated by 10% SDS PAGE under either non-reducing (−) or reducing (+) conditions. The intensity of the 130 KDa fragment markedly increased under non-reducing conditions. FIG. 19C is a western blot of co-immunoprecipitation (Co-IP) assays between Flag-tagged SWAMP (SWAMP-Flag) and HA-tagged SWAMP (SWAMP-HA) proteins. SWAMP-Flag protein is co-immunoprecipitated with SWAMP-HA protein (left panel), and SWAMP-HA protein is co-immunoprecipitated with SWAMP-Flag protein (right panel). These results demonstrate homodimerization of the SWAMP protein.

[0052] FIG. 19D is a photograph of a western blot. HEK293T cells were transfected with a full-length SWAMP (APCDD1) expression construct containing a Flag-tag just downstream of the signal peptide and an HA-tag at the C-terminus, and analyzed cell lysates and supernatants by western blotting. An expression construct for a truncated SWAMP lacking the trans-membrane domain (SWAMP-ΔTM) was also transfected as a positive control. S, signal peptide. TM, transmembrane domain. Western blots with anti-Flag, anti-SWAMP and anti-Flag antibodies detected a strong fragment, around 63 KDa in size, in the medium of SWAMP-ΔTM-expressing cells, while no fragments were detected in medium of full-length SWAMP-expressing cells. beta-actin was used as a normalization control, and also used to show that the cell lysate did not contaminate the medium.

[0053] FIGS. 20A-H are photomicrographs demonstrating that the mutation L9R affects the co-translational processing of the mutant SWAMP (APCDD1). FIGS. 20A-H show immunofluorescence for SWAMP on HEK293T cells (FIGS. 20A, 20B) or Bend3.0 cells (FIGS. 20C-H) transfected with Wt SWAMP (FIGS. 20A, 20C, 20F), L9R mutant SWAMP (FIGS. 20B, 20D, 20G), or L9V mutant SWAMP (FIGS. 20E, 20H). Cell membrane was labeled with an anti-pan-cadherin antibody (FIGS. 20A, 20B). Scale bar: 20 μm (FIG. 20A). Bend3.0 cells were either not permeabilized with TritonX-100 (FIGS. 20C-E) to determine surface expression of SWAMP or permeabilized (FIGS. 20E-H) to detect total protein. Note that WT or L9V SWAMP isoforms localize to the plasma membrane (FIGS. 20A, 20C, 20F, 20E, 20H), whereas the L9R SWAMP is not present in the membrane, but is retained in the secretory pathway FIGS. 20B, 20D, 20G). The bottom panels are merged images and counterstaining with DAPI is shown in blue (FIGS. 20A, 20B).

[0054] FIGS. 20I-K are photographs of a western blot and microscopy images. N-terminal GFP-tagged SWAMP proteins (GST-SWAMP) were overexpressed in HEK293T cells, which were analyzed by western blot (FIG. 20I) and immunocytostainings (FIGS. 20J, 20K) with the rabbit polyclonal anti-SWAMP antibody. The western blot clearly showed that the signal peptide sequence of wild type SWAMP (GFP-Wt) was cleaved, while that of the L9R mutant (GFP-L9R) was not (FIG. 20I). beta-actin was used as a normalization control (FIG. 20I) GFP-Wt-SWAMP protein is detected at the cell membrane (FIG. 20J), while the GFP-L9R-SWAMP is retained within the cytoplasm (FIG. 20K). The bottom panels are merged images and counterstaining with DAPI is shown in blue (FIGS. 20J, 20K).

### DETAILED DESCRIPTION OF THE INVENTION

[0055] The invention provides for a new therapeutic target, namely APCDD1, for modulation of hair color (pigmentation) and hair growth/density. Therapies utilizing this gene target are provided to treat loss of hair pigment (“graying”), loss of hair density, as well as too much hair. In one embodiment, APCDD1 can be used to treat hair loss disorders, such as androgenetic alopecia.

[0056] Hair follicle (HF) miniaturization, seen in androgenetic alopecia (AGA) or male/female pattern baldness, is a degenerative process that occurs in humans, and causes a reduction in the epithelial and mesenchymal compartments of the HF^{A4}. Despite molecular characterization of several genes that are differentially expressed among various HF cell populations, family-based linkage approaches in AGA^{A5}, or recent genome-wide association studies^{A6, A7} have failed to elucidate the genetic architecture of this polygenic disorder.

[0057] In one embodiment, to gain insight into the genetic underpinning of HF miniaturization in humans, the causative gene for the autosomal dominant hereditary hypotrichosis simplex (HHS; OMIM 146520)^{A2} was identified. The disease is characterized histologically by HF miniaturization^{A1} and a progressive hair loss that begins in early childhood, continues throughout life, and is independent of hormonal effects. Without being bound by theory, HHS is likely caused by mutations in a single autosomal gene given the simple Mendelian inheritance pattern, the rarity of affected families, and the absence of gender predilection (for example, see infra Example 2).

[0058] Overview of the Integument and Hair Cells

[0059] The integument (or skin) is the largest organ of the body and is a highly complex organ covering the external surface of the body. It merges, at various body openings, with the mucous membranes of the alimentary and other canals. The integument performs a number of essential functions such as maintaining a constant internal environment via regulating body temperature and water loss; excretion by the sweat glands; but predominantly acts as a protective barrier against the action of physical, chemical and biologic agents on deeper tissues. Skin is elastic and except for a few areas such as the soles, palms, and ears, it is loosely attached to the underlying tissue. It also varies in thickness from 0.5 mm (0.02 inches) on the eyelids (“thin skin”) to 4 mm (0.17 inches) or more on the palms and soles (“thick skin”) (Ross M H, Histology: A text and atlas, 3^{rd} edition, Williams and Wilkins, 1995: Chapter 14; Burkitt H G, et al, Wheater's Functional Histology, 3^{rd} Edition, Churchill Livingstone, 1996: Chapter 9).

[0060] The skin is composed of two layers: a) the epidermis and b) the dermis. The epidermis is the outer layer, which is comparatively thin (0.1 mm). It is several cells thick and is composed of 5 layers: the stratum germinativum, stratum spinosum, stratum granulosum, stratum lucidum (which is limited to thick skin), and the stratum corneum. The outermost epidermal layer (the stratum corneum) consists of dead cells that are constantly shed from the surface and replaced from below by a single, basal layer of cells, called the stratum germinativum. The epidermis is composed predominantly of keratinocytes, which make up over 95% of the cell population. Keratinocytes of the basal layer (stratum germinativum) are constantly dividing, and daughter cells subsequently move upwards and outwards, where they undergo a period of differentiation, and are eventually sloughed off from the surface. The remaining cell population of the epidermis includes dendritic cells such as Langerhans cells and melanocytes. The epidermis is essentially cellular and non-vascular, containing little extracellular matrix except for the layer of collagen and other proteins beneath the basal layer of keratinocytes (Ross M H, Histology: A text and atlas, 3^{rd} edition, Williams and Wilkins, 1995: Chapter 14; Burkitt H G, et al, Wheater's Functional Histology, 3^{rd} Edition, Churchill Livingstone, 1996: Chapter 9).

[0061] The dermis is the inner layer of the skin and is composed of a network of collagenous extracellular material, blood vessels, nerves, and elastic fibers. Within the dermis are hair follicles with their associated sebaceous glands (collectively known as the pilosebaceous unit) and sweat glands. The interface between the epidermis and the dermis is extremely irregular and uneven, except in thin skin. Beneath the basal epidermal cells along the epidermal-dermal interface, the specialized extracellular matrix is organized into a distinct structure called the basement membrane (Ross M H, Histology: A text and atlas, 3^{rd} edition, Williams and Wilkins, 1995: Chapter 14; Burkitt H G, et al, Wheater's Functional Histology, 3^{rd} Edition, Churchill Livingstone, 1996: Chapter 9).

[0062] The mammalian hair fiber is composed of keratinized cells and develops from the hair follicle. The hair follicle is a peg of tissue derived from a downgrowth of the epidermis, which lies immediately underneath the skin's surface. The distal part of the hair follicle is in direct continuation with the external, cutaneous epidermis. Although a small structure, the hair follicle comprises a highly organized system of recognizably different layers arranged in concentric series. Active hair follicles extend down through the dermis, the hypodermis (which is a loose layer of connective tissue), and into the fat or adipose layer (Ross M H, Histology: A text and atlas, 3^{rd} edition, Williams and Wilkins, 1995: Chapter 14; Burkitt H G, et al, Wheater's Functional Histology, 3^{rd} Edition, Churchill Livingstone, 1996: Chapter 9).

[0063] At the base of an active hair follicle lies the hair bulb. The bulb consists of a body of dermal cells, known as the dermal papilla, contained in an inverted cup of epidermal cells known as the epidermal matrix. Irrespective of follicle type, the germinative epidermal cells at the very base of this epidermal matrix produce the hair fiber, together with several supportive epidermal layers. The lowermost dermal sheath is contiguous with the papilla basal stalk, from where the sheath curves externally around all of the hair matrix epidermal layers as a thin covering of tissue. The lowermost portion of the dermal sheath then continues as a sleeve or tube for the length of the follicle (Ross M H, Histology: A text and atlas, 3^{rd} edition, Williams and Wilkins, 1995: Chapter 14; Burkitt H G, et al, Wheater's Functional Histology, 3^{rd} Edition, Churchill Livingstone, 1996: Chapter 9).

[0064] Developing skin appendages, such as hair and feather follicles, rely on the interaction between the epidermis and the dermis, the two layers of the skin. In embryonic development, a sequential exchange of information between these two layers supports a complex series of morphogenetic processes, which results in the formation of adult follicle structures. However, in contrast to general skin dermal and epidermal cells, certain hair follicle cell populations, following maturity, retain their embryonic-type interactive, inductive, and biosynthetic behaviors. These properties can be derived from the very dynamic nature of the cyclical productive follicle, wherein repeated tissue remodeling necessitates a high level of dermal-epidermal interactive communication, which is vital for embryonic development and would be desirable in other forms of tissue reconstruction.

[0065] The hair fiber is produced at the base of an active follicle at a very rapid rate. For example, follicles produce hair fibers at a rate 0.4 mm per day in the human scalp and up to 1.5 mm per day in the rat vibrissa or whiskers, which means that cell proliferation in the follicle epidermis ranks amongst the fastest in adult tissues (Malkinson F D and J T Kearn, Int J Dermatol 1978, 17:536-551). Hair grows in cycles. The anagen phase is the growth phase, wherein up to 90% of the hair follicles said to be in anagen; catagen is the involuting or regressing phase which accounts for about 1-2% of the hair follicles; and telogen is the resting or quiescent phase of the cycle, which accounts for about 10-14% of the hair follicles. The cycle's length varies on different parts of the body.

[0066] Hair follicle formation and cycling is controlled by a balance of inhibitory and stimulatory signals. The signaling cues are potentiated by growth factors that are members of the TGFβ-BMP family. A prominent antagonist of the members of the TGFβ-BMP family is follistatin. Follistatin is a secreted protein that inhibits the action of various BMPs (such as BMP-2, -4, -7, and -11) and activins by binding to said proteins, and purportedly plays a role in the development of the hair follicle (Nakamura M, et al., FASEB J, 2003, 17(3):497-9; Patel K Intl J Biochem Cell Bio, 1998, 30:1087-93; Ueno N, et al., PNAS, 1987, 84:8282-86; Nakamura T, et al., Nature, 1990, 247:836-8; Iemura S, et al., PNAS, 1998, 77:649-52; Fainsod A, et al., Mech Dev, 1997, 63:39-50; Gamer L W, et al., Dev Biol, 1999, 208:222-32).

[0067] The deeply embedded end bulb, where local dermal-epidermal interactions drive active fiber growth, is the signaling center of the hair follicle comprising a cluster of mesenchymal cells, called the dermal papilla (DP). This same region is also central to the tissue remodeling and developmental changes involved in the hair fiber's or appendage's precise alternation between growth and regression phases. The DP, a key player in these activities, appears to orchestrate the complex program of differentiation that characterizes hair fiber formation from the primitive germinative epidermal cell source (Oliver R F, J Soc Cosmet Chem, 1971, 22:741-755; Oliver R F and C A Jahoda, Biology of Wool and Hair (eds Roger et al.), 1971, Cambridge University Press:51-67; Reynolds A J and C A Jahoda, Development, 1992, 115:587-593; Reynolds A J, et al., J Invest Dermatol, 1993, 101:634-38).

[0068] The lowermost dermal sheath (DS) arises below the basal stalk of the papilla, from where it curves outwards and upwards. This dermal sheath then externally encases the layers of the epidermal hair matrix as a thin layer of tissue and continues upward for the length of the follicle. The epidermally-derived outer root sheath (ORS) also continues for the length of the follicle, which lies immediately internal to the dermal sheath in between the two layers, and forms a specialized basement membrane termed the glassy membrane. The outer root sheath constitutes little more than an epidermal monolayer in the lower follicle, but becomes increasingly thickened as it approaches the surface. The inner root sheath (IRS) forms a mold for the developing hair shaft. It comprises three parts: the Henley layer, the Huxley layer, and the cuticle, with the cuticle being the innermost portion that touches the hair shaft. The IRS cuticle layer is a single cell thick and is located adjacent to the hair fiber. It closely interdigitates with the hair fiber cuticle layer. The Huxley layer can comprise up to four cell layers. The IRS Henley layer is the single cell layer that runs adjacent to the ORS layer (Ross M H, Histology: A text and atlas, 3^{rd} edition, Williams and Wilkins, 1995: Chapter 14; Burkitt H G, et al, Wheater's Functional Histology, 3^{rd} Edition, Churchill Livingstone, 1996: Chapter 9).

[0069] Wnt Signaling

[0070] Wnt proteins are secreted from cells, however rarely as a soluble form (Papkoff J and B Schryver, Mol Cell Biol, 1990, 10:2723-30; Burrus L W and McMahon A P, Exp Cell Res, 1995, 220:363-73; Willert K, et al., Nature, 2003 423:448-52). Wnt proteins are glycosylated (Mason J O, et al., Mol Biol Cell, 1992, 3:521-33) and palmitoylated (Willert K, et al., Nature, 2003 423:448-52). In the Wnt signaling pathway, Wnt binds to Frizzled (Frz), a cell surface receptor that is found on various cell types. In the presence of Dishevelled (Dsh), binding of Wnt to the Frz receptor purportedly results in inhibiting GSK3β mediated phosphorylation. Inhibition of this phosphorylation event allegedly would then subsequently halt phosphorylation-dependent degradation of β-catenin. Thus, Wnt binding stabilizes cellular β-catenin. β-catenin can then accumulate in the cytoplasm in the presence of Wnt binding and can subsequently bind to a transcription factor, such as Lef1. The β-catenin-Lef1 complex is then able to translocate to the nucleus, where the β-catenin-Lef1 complex can mediate transcriptional activation. Other effects and components of the Wnt signaling pathway are described in the following: Arias A M, et al., Curr Opin Genet Dev, 1999, 9: 447-454; Nusse R, Development, 2003, 130(22):5297-305; Nelson W J and R Nusse, Science, 2004, 303:1483-7; Logan C Y and R Nusse, Annu Rev Cell Dev Biol, 2004, 20:781-810; Moon R T, et al., Nat Rev Genet, 2004, 5(9):691-701; Brennan K R and A M Brown, J Mammary Gland Biol Neoplasia, 2004, 9(2):119-31; Johnson M L, et al., Bone Miner Res, 2004, 19(11):1749-57; Nusse R, Nature, 2005, 438:747-9; Reya T and H Clevers Nature, 2005, 434:843-50; Gregorieff A and H Clevers, Genes Dev, 2005, 19(8):877-90; Bejsovec A, Cell, 2005, 120(1):11-4; Brembeck F H, et al., Curr Opin Genet Dev, 2006, 16(1):51-9; and Attisano et al., (2004) Cancer and Metastasis Reviews 23: 53-61, which are all herein incorporated by reference in their entireties. In one embodiment, APCDD1 is an inhibitor of the Wnt signaling pathway.

[0071] Hereditary Hypotrichosis Simplex (HHS)

[0072] The hair follicle (HF) is a complex organ which periodically regenerates in the form of a hair cycle. Recent advances in molecular genetics have enabled the identification of numerous genes that are expressed in the HF^{S1}. Disruption of some of these genes underlies different types of hereditary hypotrichosis (HH). HH can be largely divided into syndromic and non-syndromic forms. In syndromic forms of HH, hypotrichosis appears as a part of the disease. For example, mutations in P-cadherin gene (CDH3) are known to cause not only hypotrichosis, but also weak eyesight due to macular dystrophy of the retina (Hypotrichosis with Juvenile Macular Dystrophy; HJMD; OMIM 601553)^{S2, S3}. Some cases with CDH3 mutations also show severe digit anomalies (Ectodermal dysplasia, Ectrodactyly, and Macular dystrophy; EEM syndrome; OMIM 225280)^{S3, S4}. In non-syndromic forms of HH, hypotrichosis is the only finding detected in affected individuals. Of these, Marie Unna hypotrichosis (OMIM 146550) is an autosomal dominant disorder characterized by coarse, wiry and twisted hair shaft, and was recently reported to be caused by mutations in the 5′-regularly region of the hairless gene (HR) on chromosome 8p21^{S5}. In addition, monilethrix is characterized by a specific hair shaft anomaly known as a moniliform hair. This disease can show either an autosomal dominant (OMIM 158000) or recessive (OMIM 252200) inheritance trait, and several causative genes have been identified to date^{S6-S11}.

[0073] A rare form of hereditary hypotrichosis without any characteristic hair shaft anomalies is known as hereditary hypotrichosis simplex (HHS; OMIM 146520/605389)^{S12, S13}. Affected individuals with HHS typically show normal hair at birth, but hair loss and thinning of the hair shaft on the scalp start during early childhood and progress with age, frequently affecting the body hairs as well. Histologically, HHS is characterized by progressive HF miniaturization, which is a typical feature of androgenetic alopecia^{S12, S14}. HHS is known to be inherited as either an autosomal dominant (ADHHS)12-16 or autosomal recessive (ARHHS)17 trait. Mutations in corneodesmosin (CDSN) gene were identified in several families with ADHHS. In addition, an Italian family was previously analyzed with ADHHS and found linkage of the family to a 9.8 Mb interval on chromosome 18p11.32-p11.23^{S16}, in which the APCDD1/SWAMP gene resides (See infra at Examples). Most recently, mutations in the P2RY5 gene were reported to underlie ARHHS17 or autosomal recessive woolly hair^{S18}.

[0074] APCDD1

[0075] Human APCDD1 (adenomatosis polyposis coli down-regulated 1; also referred to as SWAMP in Example 2) is a gene assigned at chromosomal band 18p11.2, and is also referred to as B7323, DRAPC1, or FP7019. Various hair disorders, such as hypotrichosis, have been linked to genes located on chromosome 18 (for example, see Baumer et al., (2000) Eur J of Hum Genet 8: 443-8). APCDD1 is a direct target of the WNT/β-catenin signaling pathway and is regulated by the β-catenin/Tcf complex (Takahashi et al., (2002) Cancer Research, 62: 5651-56). It has been identified to be over-expressed in certain cancers, such as colon cancer and in CTNNB-1 mutated Wilms tumors (Takahashi et al., (2002) Cancer Research, 62: 5651-56; Zirn et al., (2006) Genes, Chrom, and Cancer 45: 565-74, each of which are incorporated by reference in their entireties). In one embodiment, APCDD1 is an inhibitor of the Wnt signaling pathway.

[0076] The mouse gene, Drapc1, is the ortholog of human APCDD1 and has been shown to be a target of Wnt/β-catenin signaling pathway in cancer cell lines (Jukkola et al., (2004) Gene Expression Patterns 4: 755-62). Sequence analysis of the mouse Drapc1 predicted a transcript of 1545 nucleotides that encodes a putative transmembrane (TM) protein of 514 amino acids having a molecular weight of about 58.6 kDa (Jukkola et al., (2004) Gene Expression Patterns 4: 755-62). Alignment of the putative amino acid sequences of mouse and human DRAPC1 revealed a 95% sequence similarity and DRAPC1 was found to be conserved in many vertebrate species. Jukkola et al. ((2004) Gene Expression Patterns 4: 755-62) also identified a Drapc1 related gene, Drapc2 (APCDD1-L (like)), in the human genome, having 67% similarity to Drapc1. Drapc1 was expressed in the hair follicles of the skin and was found expressed in the dermal papillae and matrix cells, which are inner root sheath (IRS) precursor cells (Jukkola et al., (2004) Gene Expression Patterns 4: 755-62).

[0077] As used herein, an “APCDD1 molecule” refers to an APCDD1 protein that includes a polypeptide that exhibits transmembrane topology. For example, an APCDD1 molecule can be the human APCDD1 protein (e.g., having the amino acid sequence shown in SEQ ID NO: 1). The APCDD1 molecule can be encoded by a nucleic acid (including, for example, genomic DNA, complementary DNA (cDNA), synthetic DNA, as well as any form of corresponding RNA). For example, an APCDD1 molecule can be encoded by a recombinant nucleic acid encoding human APCDD1 protein. The APCDD1 molecules of the invention can be obtained from various sources and can be produced according to various techniques known in the art. For example, a nucleic acid that encodes an APCDD1 molecule can be obtained by screening DNA libraries, or by amplification from a natural source. An APCDD1 molecule can include a fragment or portion of human APCDD1 protein that retains transmembrane topology. The APCDD1 molecules of the invention can be produced via recombinant DNA technology and such recombinant nucleic acids can be prepared by conventional techniques, including chemical synthesis, genetic engineering, enzymatic techniques, or a combination thereof. A non-limiting example of an APCDD1 molecule is the polypeptide encoded by the nucleic acid having the nucleotide sequence shown in SEQ ID NO: 2.

[0078] In another embodiment, an APCDD1 molecule can encompass orthologs of human APCDD1 protein. For example, an APCDD1 molecule can encompass the ortholog in mouse (such as DRAPC1), rat, non-human primates, canines, goat, rabbit, porcine, bovine, chickens, feline, and horses. An APCDD1 molecule can comprise a protein encoded by a nucleic acid sequence homologous to the human nucleic acid, wherein the nucleic acid is found in a different species and wherein that homolog encodes a protein similar to an APCDD1 protein.

[0079] An APCDD1 molecule can also encompass a variant of the human APCDD1 protein. Such a variant can comprise a naturally-occurring variant due to allelic variations between individuals (e.g., polymorphisms), mutated alleles related to hair growth, density, or pigmentation, or alternative splicing forms. In one embodiment, an APCDD1 molecule is encoded by a nucleic acid variant of the nucleic acid having the sequence shown in SEQ ID NO: 2, wherein the variant has a nucleotide sequence identity to SEQ ID NO:2 of at least about 70%, at least about 75%, at least about 80%, at least about 85%, at least about 90%, at least about 91%, at least about 92%, at least about 93%, at least about 94%, at least about 95%, at least about 96%, at least about 97%, at least about 98%, or at least about 99%. In another embodiment, a variant of the human APCDD1 protein comprises a protein or polypeptide encoded by an APCDD1 nucleic acid sequence, such as the sequence shown in SEQ ID NO: 5.

[0080] In one embodiment, an APCDD1 molecule comprises a protein or polypeptide encoded by an APCDD1 nucleic acid sequence, such as the sequence shown in SEQ ID NO: 1. In another embodiment, the polypeptide can be modified, such as by glycosylations and/or acetylations and/or chemical reaction or coupling, and can contain one or several non-natural or synthetic amino acids. An example of an APCDD1 molecule is the polypeptide having the amino acid sequence shown in SEQ ID NO: 1. In certain embodiments, the APCDD1 molecule of the invention includes variants of the human APCDD1 protein (having the amino acid sequence shown in SEQ ID NO: 1). Such variants can include those having at least from about 46% to about 50% identity to SEQ ID NO: 1, or having at least from about 50.1% to about 55% identity to SEQ ID NO: 1, or having at least from about 55.1% to about 60% identity to SEQ ID NO: 1, or having from at least about 60.1% to about 65% identity to SEQ ID NO: 1, or having from about 65.1% to about 70% identity to SEQ ID NO: 1, or having at least from about 70.1% to about 75% identity to SEQ ID NO: 1, or having at least from about 75.1% to about 80% identity to SEQ ID NO: 1, or having at least from about 80.1% to about 85% identity to SEQ ID NO: 1, or having at least from about 85.1% to about 90% identity to SEQ ID NO: 1, or having at least from about 90.1% to about 95% identity to SEQ ID NO: 1, or having at least from about 95.1% to about 97% identity to SEQ ID NO: 1, or having at least from about 97.1% to about 99% identity to SEQ ID NO: 1. In one embodiment, an APCDD1 molecule comprises a protein or polypeptide encoded by an APCDD1 nucleic acid sequence, such as the sequence shown in SEQ ID NO: 5.

[0081] The human APCDD1 polypeptide has been reported to include a putative 514 amino acid protein, while the APCDD1 cDNA comprises 2607 nucleotides that contain an open reading frame of 1542 nucleotides as set forth in SEQ ID NO: 2 (see U.S. Patent Application Publication No. 2006/0019252, which is incorporated by reference in its entirety). The open reading frame, which encodes the putative 514-amino acid protein, contains no known motif. Furthermore, APCDD1 expression is enhanced by the β-catenin/Tcf 4 complex through the binding of the complex to the two Tcf/LEF binding motifs in the transcriptional regulatory region of APCDD1 (Takahashi et al., (2002) Cancer Research, 62: 5651-56).

[0082] The polypeptide sequence of human APCDD1 is depicted in SEQ ID NO: 1. The nucleotide sequence of human APCDD1 is shown in SEQ ID NO: 2. Sequence information related to APCDD1 is accessible in public databases by GenBank Accession numbers NM_{—}153000 (for mRNA) and NP_{—}694545 (for protein).

[0083] SEQ ID NO: 1 is the human wild type amino acid sequence corresponding to APCDD1(residues 1-514):

MSWPRRLLLRYLFPALLLHGLGEGSALLHPDSRSHPRSLEKSAWRAFK
ESQCHHMLKHLHNGARITVQMPPTIEGHWVSTGCEVRSGPEFITRSYRF
YHNNTFKAYQFYYGSNRCTNPTYTLIIRGKIRLRQASWIIRGGTEADYQ
LHNVQVICHTEAVAEKLGQQVNRTCPGFLADGGPWVQDVAYDLWREEN
GCECTKAVNFAMHELQLIRVEKQYLHHNLDHLVEELFLGDIHTDATQRM
FYRPSSYQPPLQNAKNHDHACIACRIIYRSDEHHPPILPPKADLTIGL
HGEWVSQRCEVRPEVLFLTRHFIFHDNNNTWEGHYYHYSDPVCKHPTFS
IYARGRYSRGVLSSRVMGGTEFVFKVNHMKVTPMDAATASLLNVFNGNE
CGAEGSWQVGIQQDVTHTNGCVALGIKLPHTEYEIFKMEQDARGRYLLF
NGQRPSDGSSPDRPEKRATSYQMPLVQCASSSPRAEDLAEDSGSSLYGR
APGRHTWSLLLAALACLVPLLHWNIRR

[0084] The underlined amino acid sequence above in SEQ ID NO: 1 refers to a predicted transmembrane domain (TMD) region of the APCDD1 polypeptide molecule. TMD I of the human APCDD1 comprises amino acid residues from about position 493 to about position 512 of SEQ ID NO: 1.

[0085] SEQ ID NO: 2 is the human wild type nucleotide sequence corresponding to APCDD1 (nucleotides 1-2579), wherein the underscored ATG denotes the beginning of the open reading frame:

gaaatatgaa gagacgctgc agctgcggtg gcggtggcgg ccactgcagc tcagagcggc
gcacgcggcg gccggggcgg gacgcggggc cgggcgcgga gaagtcgggg cgggcggcag
agaggccggg acgcggaccg ggccggggcg cccacagccg cccgacggcg cccagagagc
gcgcgccccg cagccccgcg cctagcccgc cgggcatggg gcgcgcggca gccgcctgaa
gccccggcct ggcccggccg cacccggccg gaggcggagg gcagagcgcg cgcccagttg
cccgggcacc aaatcggagc gcggcgtgcg ggaggcccca gagcaggact ggaaatgtcc
tggccgcgcc gcctcctgct cagatacctg ttcccggccc tcctgcttca cgggctggga
gagggttctg ccctccttca tccagacagc aggtctcatc ctaggtcctt agagaaaagt
gcctggaggg cttttaagga gtcacagtgc catcacatgc tcaaacatct ccacaatggt
gcaaggatca cagtgcagat gccacctaca atcgagggcc actgggtctc cacaggctgt
gaagtaaggt caggcccaga gttcatcaca aggtcctaca gattctacca caataacacc
ttcaaggcct accaatttta ttatggcagc aaccggtgca caaatcccac ttatactctc
atcatccggg gcaagatccg cctccgccag gcctcctgga tcatccgagg gggcacggaa
gccgactacc agctgcacaa cgtccaggtg atctgccaca cagaggcggt ggccgagaag
ctcggccagc aggtgaaccg cacatgcccg ggcttcctcg cagacggggg tccctgggtg
caggacgtgg cctatgacct ctggcgagag gagaacggct gtgagtgcac caaggccgtg
aactttgcca tgcatgaact tcagctcatc cgggtggaga agcagtacct tcaccacaac
ctcgaccacc tggtcgagga gctcttcctt ggtgacattc acactgatgc cacccagagg
atgttctacc ggccctccag ttaccagccc cctctgcaga atgccaagaa ccacgaccat
gcctgcatcg cctgtcggat catctatcgg tcagacgagc accaccctcc catcctgccc
ccaaaggcag acctgaccat cggcctgcac ggggagtggg tgagccagcg ctgtgaggtg
cgccccgaag tcctcttcct cacccgccac ttcatcttcc atgacaacaa caacacctgg
gagggccact actaccacta ctcagacccg gtgtgcaagc accccacctt ctccatctac
gcccggggcc gctacagccg cggcgtcctc tcgtccaggg tcatgggagg caccgagttc
gtgttcaaag tgaatcacat gaaggtcacc cccatggatg cggccacagc ctcactgctc
aacgtcttca acgggaatga gtgcggggcc gagggctcct ggcaggtggg catccagcag
gatgtgaccc acaccaatgg ctgcgtggcc ctgggcatca aactacctca cacggagtac
gagatcttca aaatggaaca ggatgcccgg gggcgctatc tgctgttcaa cggtcagagg
cccagcgacg ggtccagccc agacaggcca gagaagagag ccacgtccta ccagatgccc
ttggtccagt gtgcctcctc ttcgccgagg gcagaggacc tcgcagaaga cagtggaagc
agcctgtatg gccgggcccc tgggaggcac acctggtccc tgctgctggc tgcacttgcc
tgccttgtcc ctctgctgca ttggaacatc cgcagataga agttttagaa agttctattt
ttccaaacca ggattcctta ctattgacag atttgcttta ccaaaagaaa agacatttat
tcttttgatg cacttgaatg ccagagaact gtccttcttt ttctcctctc cctccctccc
agcccctgag tcatgaacag caaggagtgt ttgaagtttc tgctttgaac tccgtccagc
ctgatccctg gcctgagcaa cttcacaaca gtaattgcac tttaagacag cctagagttc
tggacgagcg tgtttggtag cagggatgaa agctagggcc tcttattttt ttctcttaat
tattattata tttctgagtt aaacttagaa gaaacaacta tcaagctaca acttttcctg
ccattttcct gtggttgcag cctgtcttcc tttgaaattg ttttactctc tgagttttat
atgctggaat ccaatgcaga gttggtttgg gactgtgatc aagacacctt ttattaataa
agaagagaca caggtgtaga tatgtatata caaaaagatg tacggtctgg ccaaaccacc
ttcccagcct ttatgcaaaa aaaggggaga atcaaagctt tcatttcaga aatgttgcgt
ggaaaagtat ctgtaattaa agtttcgaag taatttaacc taaaaaaaaa aaaaaaaaa

[0086] The mouse polypeptide sequence of APCDD1 is depicted in SEQ ID NO: 3. The mouse nucleotide sequence of APCDD1 is shown in SEQ ID NO: 4. (accessible in public databases by GenBank accession number NM_{—}133237).

[0087] SEQ ID NO: 3 is the mouse wild type amino acid sequence corresponding to APCDD1 (residues 1-514):

MSRVRRLLLGYLFPALLLHGLGEGSALLHPDSRSHPRSLEKSAWRAFK
ESQCHHMLKHLHNGARITVQMPPTIEGHWVSTGCEVRSGPEFMTRSYR
FYNNNTFKAYQFYYGSNRCTNPTYTLIIRGKIRLRQASWIIRGGTEADY
QLHGVQVICHTEAVAEQLSRLVNRTCPGFLAPGGPWVQDVAYDLWQEES
NHECTKAVNFAMHELQLIRVEKQYPHHSLDHLVEELFLGDIHTDATQRV
FYRPSSYQPPLQNAKNHNHACIACRIIFRSDEHHPPILPPKADLTIGLH
GEWVSQRCEVRPEVLFLTRHFIFHDNNNTWEGHYYHYSDPVCKHPTFT
IYARGRYSRGVLSSKVMGGTEFVFKVNHMKVTPMDAATASLLNVFSGNE
CGAEGSWQVGIQQDVTHTNGCVALGIKLPHTEYEIFKMEQDTRGRYLLF
NGQRPSDGSSPDRPEKRATSYQMPLVQCASSSPRAEELLEDSQGHLYG
RAAGRTAGSLLLPAFVSLWTLPHWRILR

[0088] SEQ ID NO: 4 is the mouse wild type nucleotide sequence corresponding to APCDD1 (nucleotides 1-2799), wherein the underscored ATG denotes the beginning of the open reading frame:

agcggccact gtacctctga gctgtgcacg ccgcggccgg ggcgggcctc gggactgggg
ctgggagcca aggggccggg gcgggacgcg gagaggctgg gctgcggttc ggagtcccgc
gcggacaggg gccggacggc ggcgagggag cgcgcgcccc gcagtcccgc gctgcgccgg
ccggggatgg ggcgcgctgc tgcctgaggc ccggcctggc gggcgcccgc cgggggctgc
ggctgaggag ccgagggcgc cctgtaccgg agtggcccgc gcgcgcgctc ggagggggac
agagacggac tacagcgagg cccggaggag ccccgagatg tcccgtgtgc gccgccttct
gcttggatac ctgttcccag ccctcctgtt gcatgggctg ggagagggct ctgccctcct
tcatccagac agcagatcgc accctcggtc cttagagaaa agcgcctgga gggctttcaa
ggagtcacag tgtcatcaca tgctgaagca tctccacaac ggtgcgcgga tcacagtgca
gatgcccccg accatcgagg gccactgggt gtccacaggc tgtgaagtaa ggtcgggtcc
ggagttcatg acaaggtctt acaggttcta caacaataat accttcaagg cctaccagtt
ttactatggc agcaaccgct gtacaaaccc cacctacacc ctcatcatcc gaggcaagat
ccggcttcgc caggcgtcct ggatcatccg tgggggcacc gaagctgact accagcttca
cggcgtccaa gtcatctgcc acacagaggc agtcgctgaa cagctcagcc gactggtgaa
ccgaacttgc ccaggcttcc tggctcctgg tggtccctgg gtacaggacg tagcctatga
cctgtggcag gaggagagta accacgagtg caccaaggct gtgaactttg ccatgcacga
gctgcagctc atccgtgtgg agaagcagta tccccaccac agcctggacc acctggtgga
ggagctcttc ctgggcgaca tccacacgga cgctacccag agggtgttct accggccgtc
cagttaccag ccgcccctgc agaatgccaa gaaccacaac catgcgtgca tagcctgccg
catcattttc cggtcagatg aacaccaccc tcccatactg ccccccaagg ctgacctgac
cattggcctc cacggggaat gggtgagcca gcgctgcgag gtacgccccg aggtcctctt
cctcacccgc cacttcatct tccacgacaa caacaacacc tgggaagggc attactacca
ctactcagac cctgtctgca agcaccccac attcaccatc tacgctcgag gccgctacag
ccgcggtgtg ctctcatcta aggtcatggg tggcacggag tttgtgttca aagtgaatca
catgaaggtt actcccatgg acgcagccac agcctccctc ctcaatgtct tcagtgggaa
tgagtgtggg gctgagggct cctggcaggt gggtatccaa caggatgtga cacataccaa
tggctgcgtg gctctgggca tcaaactacc tcacacagaa tatgagatct tcaaaatgga
gcaagacacc cgaggccgct acctgctgtt caatggccag aggcccagcg atggctccag
cccagacaga ccagagaaga gagccacatc ctaccagatg cccttggtcc agtgtgcctc
ttcctcacca agagctgaag agttgttgga agacagtcaa ggtcatctgt atggcagggc
agcagggagg acagctgggt ccctgttgct tcctgccttt gtcagccttt ggactctccc
acattggcgc atcctcagat agaagacatt tcctgaacca agactcttta ccgtgtatga
ctttccttca cacagagaaa ggacattgat tcttttgatg cacttgaatg ccttgagacc
tgccgttgcc tctcctctcc ccacctcttc cagcctctgc gccatgagca gtgtgtttga
agtttcagct ttgaatgtct tcccgcccga tccgtggcct gagaacttca tagaggtgtg
attgcacttt atgtctgcag agagctgggg cgagtgtgtt taggggtggc agctgccttc
ttctctctgt cccctgactc ctgactgtgt ttctgagctg agcttaaaag atacaaatga
caagctgcag ctctctctgc cattgcttct ctttatctct ccaaatccct tccacactcg
aggttttcga cactggaacc cagtgcagcg ttggcttggg accgccatga agaccccatg
tttgcgacag gagagcctgg gttggtgttg agtacataag agacgaggca aggttcagct
aagtctttgt cccagcctta atgctaacca acactttcag aaatgttgag tagagaggtg
tccctaaagc ttcaatggaa cttaaactct gttgacaagc gagtgccggt tttcacttgt
tgagaagaga tgtgtgccat atacttggtt tggtggctac agagtacagc ctgctgctta
accctcagag gagactgatc cagttgggaa attcagagca gctcctgctc caggcagcca
gaagcagcag tggggggtgg gggtggggat tccttgtgtt aagtgccaca caactgacaa
ggagatctgt ggagtttttc tccaagtgaa ccaaatccct gtgtcctggc tcacactgtg
gttagggtgg gcacatccac tctgccatct ttaacacac

[0089] Mutations that affect hair growth or density regulation and pigmentation have been localized to the following amino acid residues of APCDD1 described below.

[0090] For example, the invention provides for isolated mutants of the human APCDD1. In one embodiment, the APCDD1 molecule can comprise at least 1 amino acid mutation in SEQ ID NO: 1. In one embodiment, the mutation comprises an amino acid substitution in the signal sequence of the APCDD1 Protein. In another embodiment, the mutation comprises a Leu to Arg substitution at amino acid position 9 (for example, SEQ ID NO: 5).

[0091] In one embodiment the amino acid mutation in the human APCDD1 can comprise a Leu>Arg mutation at amino acid position 9 of SEQ ID NO: 1. This mutation can comprise the amino acid sequence of SEQ ID NO: 5.

[0092] SEQ ID NO: 5 is the human APCDD1 amino acid sequence (residue at amino acid position 1 to residue at amino acid position 514) having a Leu>Arg substitution mutation at amino acid position 9, which is depicted in BOLD and underlined:

MSWPRRLLRRYLFPALLLHGLGEGSALLHPDSRSHPRSLEKSAWRAFKE
SQCHHMLKHLHNGARITVQMPPTIEGHWVSTGCEVRSGPEFITRSYRFY
HNNTFKAYQFYYGSNRCTNPTYTLIIRGKIRLRQASWIIRGGTEADYQL
HNVQVICHTEAVAEKLGQQVNRTCPGFLADGGPWVQDVAYDLWREENGC
ECTKAVNFAMHELQLIRVEKQYLHHNLDHLVEELFLGDIHTDATQRMFY
RPSSYQPPLQNAKNHDHACIACRIIYRSDEHHPPILPPKADLTIGLHGE
WVSQRCEVRPEVLFLTRHFIFHDNNNTWEGHYYHYSDPVCKHPTFSIYA
RGRYSRGVLSSRVMGGTEFVFKVNHMKVTPMDAATASLLNVFNGNECG
AEGSWQVGIQQDVTHTNGCVALGIKLPHTEYEIFKMEQDARGRYLLFNG
QRPSDGSSPDRPEKRATSYQMPLVQCASSSPRAEDLAEDSGSSLYGRAP
GRHTWSLLLAALACLVPLLHWNIRR

[0093] The invention also provides for isolated mutants of the human APCDD1, wherein the isolated mutant human APCDD1 is encoded by a nucleic acid sequence comprising at least about 50%, at least about 60%, at least about 65%, at least about 75%, at least about 80%, at least about 85%, at least about 90%, at least about 91%, at least about 92%, at least about 93%, at least about 94%, at least about 95%, at least about 96%, at least about 97%, at least about 98%, or at least about 99% identify with SEQ ID NO: 2.

[0094] For example, SEQ ID NO: 6 (below) is the human nucleotide sequence corresponding to APCDD1 (nucleotides 1-2579), wherein the underscored ATG denotes the beginning of the open reading frame (ORF), and a thymine (T) to guanine (G) missense mutation is denoted at position 26 from the beginning of the ORF (italicized in red):

gaaatatgaa gagacgctgc agctgcggtg gcggtggcgg ccactgcagc tcagagcggc
gcacgcggcg gccggggcgg gacgcggggc cgggcgcgga gaagtcgggg cgggcggcag
agaggccggg acgcggaccg ggccggggcg cccacagccg cccgacggcg cccagagagc
gcgcgccccg cagccccgcg cctagcccgc cgggcatggg gcgcgcggca gccgcctgaa
gccccggcct ggcccggccg cacccggccg gaggcggagg gcagagcgcg cgcccagttg
cccgggcacc aaatcggagc gcggcgtgcg ggaggcccca gagcaggact ggaaatgtcc
tggccgcgcc gcctcctgc [symbol] cagatacctg ttcccggccc tcctgcttca cgggctggga
gagggttctg ccctccttca tccagacagc aggtctcatc ctaggtcctt agagaaaagt
gcctggaggg cttttaagga gtcacagtgc catcacatgc tcaaacatct ccacaatggt
gcaaggatca cagtgcagat gccacctaca atcgagggcc actgggtctc cacaggctgt
gaagtaaggt caggcccaga gttcatcaca aggtcctaca gattctacca caataacacc
ttcaaggcct accaatttta ttatggcagc aaccggtgca caaatcccac ttatactctc
atcatccggg gcaagatccg cctccgccag gcctcctgga tcatccgagg gggcacggaa
gccgactacc agctgcacaa cgtccaggtg atctgccaca cagaggcggt ggccgagaag
ctcggccagc aggtgaaccg cacatgcccg ggcttcctcg cagacggggg tccctgggtg
caggacgtgg cctatgacct ctggcgagag gagaacggct gtgagtgcac caaggccgtg
aactttgcca tgcatgaact tcagctcatc cgggtggaga agcagtacct tcaccacaac
ctcgaccacc tggtcgagga gctcttcctt ggtgacattc acactgatgc cacccagagg
atgttctacc ggccctccag ttaccagccc cctctgcaga atgccaagaa ccacgaccat
gcctgcatcg cctgtcggat catctatcgg tcagacgagc accaccctcc catcctgccc
ccaaaggcag acctgaccat cggcctgcac ggggagtggg tgagccagcg ctgtgaggtg
cgccccgaag tcctcttcct cacccgccac ttcatcttcc atgacaacaa caacacctgg
gagggccact actaccacta ctcagacccg gtgtgcaagc accccacctt ctccatctac
gcccggggcc gctacagccg cggcgtcctc tcgtccaggg tcatgggagg caccgagttc
gtgttcaaag tgaatcacat gaaggtcacc cccatggatg cggccacagc ctcactgctc
aacgtcttca acgggaatga gtgcggggcc gagggctcct ggcaggtggg catccagcag
gatgtgaccc acaccaatgg ctgcgtggcc ctgggcatca aactacctca cacggagtac
gagatcttca aaatggaaca ggatgcccgg gggcgctatc tgctgttcaa cggtcagagg
cccagcgacg ggtccagccc agacaggcca gagaagagag ccacgtccta ccagatgccc
ttggtccagt gtgcctcctc ttcgccgagg gcagaggacc tcgcagaaga cagtggaagc
agcctgtatg gccgggcccc tgggaggcac acctggtccc tgctgctggc tgcacttgcc
tgccttgtcc ctctgctgca ttggaacatc cgcagataga agttttagaa agttctattt
ttccaaacca ggattcctta ctattgacag atttgcttta ccaaaagaaa agacatttat
tcttttgatg cacttgaatg ccagagaact gtccttcttt ttctcctctc cctccctccc
agcccctgag tcatgaacag caaggagtgt ttgaagtttc tgctttgaac tccgtccagc
ctgatccctg gcctgagcaa cttcacaaca gtaattgcac tttaagacag cctagagttc
tggacgagcg tgtttggtag cagggatgaa agctagggcc tcttattttt ttctcttaat
tattattata tttctgagtt aaacttagaa gaaacaacta tcaagctaca acttttcctg
ccattttcct gtggttgcag cctgtcttcc tttgaaattg ttttactctc tgagttttat
atgctggaat ccaatgcaga gttggtttgg gactgtgatc aagacacctt ttattaataa
agaagagaca caggtgtaga tatgtatata caaaaagatg tacggtctgg ccaaaccacc
ttcccagcct ttatgcaaaa aaaggggaga atcaaagctt tcatttcaga aatgttgcgt
ggaaaagtat ctgtaattaa agtttcgaag taatttaacc taaaaaaaaa aaaaaaaaa

[0095] Substitution, insertion, and deletion mutants of the APCDD1 nucleic acid sequence or amino acid sequence can be generated as discussed below.

[0096] DNA and Amino Acid Manipulation Methods and Purification Thereof

[0097] The present invention utilizes conventional molecular biology, microbiology, and recombinant DNA techniques available to one of ordinary skill in the art. Such techniques are well known to the skilled worker and are explained fully in the literature. See, e.g., Maniatis, Fritsch & Sambrook, “Molecular Cloning: A Laboratory Manual” (1982): “DNA Cloning: A Practical Approach,” Volumes I and II (D. N. Glover, ed., 1985); “Oligonucleotide Synthesis” (M. J. Gait, ed., 1984); “Nucleic Acid Hybridization” (B. D. Hames & S. J. Higgins, eds., 1985); “Transcription and Translation” (B. D. Hames & S. J. Higgins, eds., 1984); “Animal Cell Culture” (R. I. Freshney, ed., 1986); “Immobilized Cells and Enzymes” (IRL Press, 1986): B. Perbal, “A Practical Guide to Molecular Cloning” (1984), and Sambrook, et al., “Molecular Cloning: a Laboratory Manual” (1989).

[0098] One skilled in the art can obtain an APCDD1 protein or a variant thereof, in several ways, which include, but are not limited to, isolating the protein via biochemical means or expressing a nucleotide sequence encoding the protein of interest by genetic engineering methods.

[0099] The invention provides for a nucleic acid encoding an APCDD1 molecule or variants thereof. In one embodiment, the nucleic acid is expressed in an expression cassette, for example, to achieve overexpression in a cell. The nucleic acids of the invention can be an RNA, cDNA, cDNA-like, or a DNA of interest in an expressible format, such as an expression cassette, which can be expressed from the natural promoter or an entirely heterologous promoter. The nucleic acid of interest can encode a protein, and may or may not include introns.

[0100] Protein variants can include amino acid sequence modifications. For example, amino acid sequence modifications fall into one or more of three classes: substitutional, insertional or deletional variants. Insertions can include amino and/or carboxyl terminal fusions as well as intrasequence insertions of single or multiple amino acid residues. Insertions ordinarily will be smaller insertions than those of amino or carboxyl terminal fusions, for example, on the order of one to four residues. Deletions are characterized by the removal of one or more amino acid residues from the protein sequence. These variants ordinarily are prepared by site-specific mutagenesis of nucleotides in the DNA encoding the protein, thereby producing DNA encoding the variant, and thereafter expressing the DNA in recombinant cell culture.

[0101] Techniques for making substitution mutations at predetermined sites in DNA having a known sequence are well known, for example M13 primer mutagenesis and PCR mutagenesis. Amino acid substitutions can be single residues, but can occur at a number of different locations at once. In one non-limiting embodiment, insertions can be on the order of about from 1 to about 10 amino acid residues, while deletions can range from about 1 to about 30 residues. Deletions or insertions can be made in adjacent pairs (for example, a deletion of about 2 residues or insertion of about 2 residues). Substitutions, deletions, insertions, or any combination thereof can be combined to arrive at a final construct. The mutations cannot place the sequence out of reading frame and should not create complementary regions that can produce secondary mRNA structure. Substitutional variants are those in which at least one residue has been removed and a different residue inserted in its place.

[0102] In one embodiment, an isolated mutant human APCDD1 polypeptide can contain a Leu>Arg mutation at amino acid position 9 of SEQ ID NO: 1. The APCDD1 Leu>Arg mutant can comprise the amino acid sequence of SEQ ID NO: 5.

[0103] The invention also provides for isolated human APCDD1 polypeptides that contain an insertional or deletional mutations at the nucleic acid level. In one embodiment, an isolated mutant human APCDD1 polypeptide can be encoded by a nucleic acid sequence comprising at least about 50%, at least about 60%, at least about 70%, at least about 75%, at least about 80%, at least about 90%, at least about 95%, or at least about 99% identify to SEQ ID NO: 2. In another embodiment, the isolated human APCDD1 polypeptide is encoded by a nucleotide sequence that comprises the nucleic acid sequence of SEQ ID NO: 6.

[0104] Substantial changes in function or immunological identity are made by selecting selecting residues that differ more significantly in their effect on maintaining (a) the structure of the polypeptide backbone in the area of the substitution, for example as a sheet or helical conformation, (b) the charge or hydrophobicity of the molecule at the target site or (c) the bulk of the side chain. The substitutions that can produce the greatest changes in the protein properties will be those in which (a) a hydrophilic residue, e.g. seryl or threonyl, is substituted for (or by) a hydrophobic residue, e.g. leucyl, isoleucyl, phenylalanyl, valyl or alanyl; (b) a cysteine or proline is substituted for (or by) any other residue; (c) a residue having an electropositive side chain, e.g., lysyl, arginyl, or histidyl, is substituted for (or by) an electronegative residue, e.g., glutamyl or aspartyl; or (d) a residue having a bulky side chain, e.g., phenylalanine, is substituted for (or by) one not having a side chain, e.g., glycine, in this case, (e) by increasing the number of sites for sulfation and/or glycosylation.

[0105] Minor variations in the amino acid sequences of APCDD1 molecules is provided by the present invention. The variations in the amino acid sequence can be when the sequence maintains at least about 30%, at least about 40%, at least about 50%, at least about 60%, at least about 70%, at least about 75%, at least about 80%, at least about 90%, at least about 95%, or at least about 99% identity to SEQ ID NO:1. For example, conservative amino acid replacements can be utilized. Conservative replacements are those that take place within a family of amino acids that are related in their side chains, wherein the interchangeability of residues have similar side chains.

[0106] Genetically encoded amino acids are generally divided into families: (1) acidic amino acids are aspartate, glutamate; (2) basic amino acids are lysine, arginine, histidine; (3) non-polar amino acids are alanine, valine, leucine, isoleucine, proline, phenylalanine, methionine, tryptophan, and (4) uncharged polar amino acids are glycine, asparagine, glutamine, cysteine, serine, threonine, tyrosine. The hydrophilic amino acids include arginine, asparagine, aspartate, glutamine, glutamate, histidine, lysine, serine, and threonine. The hydrophobic amino acids include alanine, cysteine, isoleucine, leucine, methionine, phenylalanine, proline, tryptophan, tyrosine and valine. Other families of amino acids include (i) a group of amino acids having aliphatic-hydroxyl side chains, such as serine and threonine; (ii) a group of amino acids having amide-containing side chains, such as asparagine and glutamine; (iii) a group of amino acids having aliphatic side chains such as glycine, alanine, valine, leucine, and isoleucine; (iv) a group of amino acids having aromatic side chains, such as phenylalanine, tyrosine, and tryptophan; and (v) a group of amino acids having sulfur-containing side chains, such as cysteine and methionine. Useful conservative amino acids substitution groups are: valine-leucine-isoleucine, phenylalanine-tyrosine, lysine-arginine, alanine valine, glutamic-aspartic, and asparagine-glutamine.

[0107] For example, the replacement of one amino acid residue with another that is biologically and/or chemically similar is known to those skilled in the art as a conservative substitution. For example, a conservative substitution would be replacing one hydrophobic residue for another, or one polar residue for another. The substitutions include combinations such as, for example, Gly, Ala; Val, Ile, Leu; Asp, Glu; Asn, Gin; Ser, Thr; Lys, Arg; and Phe, Tyr. Substitutional or deletional mutagenesis can be employed to insert sites for N-glycosylation (Asn-X-Thr/Ser) or O-glycosylation (Ser or Thr). Deletions of cysteine or other labile residues also can be desirable. Deletions or substitutions of potential proteolysis sites, e.g. Arg, is accomplished for example by deleting one of the basic residues or substituting one by glutaminyl or histidyl residues.

[0108] Bacterial and Yeast Expression Systems

[0109] In bacterial systems, a number of expression vectors can be selected. For example, when a large quantity of APCDD1 protein is needed for the induction of antibodies, vectors which direct high level expression of proteins that are readily purified can be used. Non-limiting examples of such vectors include multifunctional E. coli cloning and expression vectors such as BLUESCRIPT (Stratagene). pIN vectors or pGEX vectors (Promega, Madison, Wis.) also can be used to express foreign polypeptide molecules as fusion proteins with glutathione S-transferase (GST). In general, such fusion proteins are soluble and can easily be purified from lysed cells by adsorption to glutathione-agarose beads followed by elution in the presence of free glutathione. Proteins made in such systems can be designed to include heparin, thrombin, or factor Xa protease cleavage sites so that the cloned polypeptide of interest can be released from the GST moiety at will.

[0110] Plant and Insect Expression Systems

[0111] If plant expression vectors are used, the expression of sequences encoding an APCDD1 molecule can be driven by any of a number of promoters. For example, viral promoters such as the ³⁵S and 19S promoters of CaMV can be used alone or in combination with the omega leader sequence from TMV. Alternatively, plant promoters such as the small subunit of RUBISCO or heat shock promoters, can be used. These constructs can be introduced into plant cells by direct DNA transformation or by pathogen-mediated transfection.

[0112] An insect system also can be used to express APCDD1 molecules. For example, in one such system Autographa californica nuclear polyhedrosis virus (AcNPV) is used as a vector to express foreign genes in Spodoptera frugiperda cells or in Trichoplusia larvae. Sequences encoding an APCDD1 molecule can be cloned into a non-essential region of the virus, such as the polyhedrin gene, and placed under control of the polyhedrin promoter. Successful insertion of APCDD1 nucleic acid sequences will render the polyhedrin gene inactive and produce recombinant virus lacking coat protein. The recombinant viruses can then be used to infect S. frugiperda cells or Trichoplusia larvae in which APCDD1 or a variant thereof can be expressed.

[0113] Mammalian Expression Systems

[0114] An expression vector can include a nucleotide sequence that encodes an APCDD1 molecule linked to at least one regulatory sequence in a manner allowing expression of the nucleotide sequence in a host cell. A number of viral-based expression systems can be used to express an APCDD1 molecule or a variant thereof in mammalian host cells. For example, if an adenovirus is used as an expression vector, sequences encoding an APCDD1 molecule can be ligated into an adenovirus transcription/translation complex comprising the late promoter and tripartite leader sequence. Insertion into a non-essential E1 or E3 region of the viral genome can be used to obtain a viable virus which can express an APCDD1 molecule in infected host cells. Transcription enhancers, such as the Rous sarcoma virus (RSV) enhancer, can also be used to increase expression in mammalian host cells.

[0115] Regulatory sequences are well known in the art, and can be selected to direct the expression of a protein or polypeptide of interest (such as an APCDD1 molecule) in an appropriate host cell as described in Goeddel, Gene Expression Technology: Methods in Enzymology 185, Academic Press, San Diego, Calif. (1990). Non-limiting examples of regulatory sequences include: polyadenylation signals, promoters (such as CMV, ASV, SV40, or other viral promoters such as those derived from bovine papilloma, polyoma, and Adenovirus 2 viruses (Fiers, et al., 1973, Nature 273:113; Hager G L, et al., Curr Opin Genet Dev, 2002, 12(2):137-41) enhancers, and other expression control elements.

[0116] Enhancer regions, which are those sequences found upstream or downstream of the promoter region in non-coding DNA regions, are also known in the art to be important in optimizing expression. If needed, origins of replication from viral sources can be employed, such as if a prokaryotic host is utilized for introduction of plasmid DNA. However, in eukaryotic organisms, chromosome integration is a common mechanism for DNA replication.

[0117] For stable transfection of mammalian cells, a small fraction of cells can integrate introduced DNA into their genomes. The expression vector and transfection method utilized can be factors that contribute to a successful integration event. For stable amplification and expression of a desired protein, a vector containing DNA encoding a protein of interest (fir example, an APCDD1 molecule) is stably integrated into the genome of eukaryotic cells (for example mammalian cells, such as cells from the end bulb of the hair follicle), resulting in the stable expression of transfected genes. An exogenous nucleic acid sequence can be introduced into a cell (such as a mammalian cell, either a primary or secondary cell) by homologous recombination as disclosed in U.S. Pat. No. 5,641,670, the contents of which are herein incorporated by reference.

[0118] A gene that encodes a selectable marker (e.g., resistance to antibiotics or drugs, such as ampicillin, neomycin, G418, and hygromycin) can be introduced into host cells along with the gene of interest to identify and select clones that stably express a gene encoding a protein of interest. The gene encoding a selectable marker can be introduced into a host cell on the same plasmid as the gene of interest or can be introduced on a separate plasmid. Cells containing the gene of interest can be identified by drug selection wherein cells that have incorporated the selectable marker gene will survive in the presence of the drug. Cells that have not incorporated the gene for the selectable marker die. Surviving cells can then be screened for the production of the desired protein molecule (for example, APCDD1).

[0119] Cell Transfection

[0120] A eukaryotic expression vector can be used to transfect cells in order to produce proteins (for example, an APCDD1 molecule) encoded by nucleotide sequences of the vector. Mammalian cells (such as isolated cells from the hair bulb; for example dermal sheath cells and dermal papilla cells) can contain an expression vector (for example, one that contains a gene encoding APCDD1 molecule) via introducing the expression vector into an appropriate host cell via methods known in the art.

[0121] A host cell strain can be chosen for its ability to modulate the expression of the inserted sequences or to process the expressed APCDD1 polypeptide in the desired fashion. Such modifications of the polypeptide include, but are not limited to, acetylation, carboxylation, glycosylation, phosphorylation, lipidation, and acylation. Post-translational processing which cleaves a “prepro” form of the polypeptide also can be used to facilitate correct insertion, folding and/or function. Different host cells which have specific cellular machinery and characteristic mechanisms for post-translational activities (e.g., CHO, HeLa, MDCK, HEK293T, and WI38), are available from the American Type Culture Collection (ATCC; 10801 University Boulevard, Manassas, Va. 20110-2209) and can be chosen to ensure the correct modification and processing of the foreign protein.

[0122] An exogenous nucleic acid can be introduced into a cell via a variety of techniques known in the art, such as lipofection, microinjection, calcium phosphate or calcium chloride precipitation, DEAE-dextran-mediated transfection, or electroporation. Electroporation is carried out at approximate voltage and capacitance to result in entry of the DNA construct(s) into cells of interest (such as cells of the end bulb of a hair follicle, for example dermal papilla cells or dermal sheath cells). Other methods used to transfect cells can also include modified calcium phosphate precipitation, polybrene precipitation, liposome fusion, and receptor-mediated gene delivery.

[0123] Cells that will be genetically engineered can be primary and secondary cells obtained from various tissues, and include cell types which can be maintained and propagated in culture. Non-limiting examples of primary and secondary cells include epithelial cells (for example, dermal papilla cells, hair follicle cells, inner root sheath cells, outer root sheath cells, sebaceous gland cells, epidermal matrix cells), neural cells, endothelial cells, glial cells, fibroblasts, muscle cells (such as myoblasts) keratinocytes, formed elements of the blood (e.g., lymphocytes, bone marrow cells), and precursors of these somatic cell types.

[0124] Vertebrate tissue can be obtained by methods known to one skilled in the art, such a punch biopsy or other surgical methods of obtaining a tissue source of the primary cell type of interest. In one embodiment, a punch biopsy or removal can be used to obtain a source of keratinocytes, fibroblasts, endothelial cells, or mesenchymal cells (for example, hair follicle cells or dermal papilla cells). In another embodiment, removal of a hair follicle can be used to obtain a source of fibroblasts, keratinocytes, endothelial cells, or mesenchymal cells (for example, hair follicle cells or dermal papilla cells). A mixture of primary cells can be obtained from the tissue, using methods readily practiced in the art, such as explanting or enzymatic digestion (for examples using enzymes such as pronase, trypsin, collagenase, elastase dispase, and chymotrypsin). Biopsy methods have also been described in United States Patent Application Publication 2004/0057937 and PCT application publication WO 2001/32840, and are hereby incorporated by reference.

[0125] Primary cells can be acquired from the individual to whom the genetically engineered primary or secondary cells are administered. However, primary cells can also be obtained from a donor, other than the recipient, of the same species. The cells can also be obtained from another species (for example, rabbit, cat, mouse, rat, sheep, goat, dog, horse, cow, bird, or pig). Primary cells can also include cells from an isolated vertebrate tissue source grown attached to a tissue culture substrate (for example, flask or dish) or grown in a suspension; cells present in an explant derived from tissue; both of the aforementioned cell types plated for the first time; and cell culture suspensions derived from these plated cells. Secondary cells can be plated primary cells that are removed from the culture substrate and replated, or passaged, in addition to cells from the subsequent passages. Secondary cells can be passaged one or more times. These primary or secondary cells can contain expression vectors having a gene that encodes a protein of interest (for example, an APCDD1 molecule).

[0126] Cell Culturing

[0127] Various culturing parameters can be used with respect to the host cell being cultured. Appropriate culture conditions for mammalian cells are well known in the art (Cleveland W L, et al., J Immunol Methods, 1983, 56(2): 221-234) or can be determined by the skilled artisan (see, for example, Animal Cell Culture: A Practical Approach 2nd Ed., Rickwood, D. and Hames, B. D., eds. (Oxford University Press: New York, 1992)). Cell culturing conditions can vary according to the type of host cell selected. Commercially available medium can be utilized. Non-limiting examples of medium include, for example, Minimal Essential Medium (MEM, Sigma, St. Louis, Mo.); Dulbecco's Modified Eagles Medium (DMEM, Sigma); Ham's F10 Medium (Sigma); HyClone cell culture medium (HyClone, Logan, Utah); RPMI-1640 Medium (Sigma); and chemically-defined (CD) media, which are formulated for various cell types, e.g., CD-CHO Medium (Invitrogen, Carlsbad, Calif.).

[0128] The cell culture media can be supplemented as necessary with supplementary components or ingredients, including optional components, in appropriate concentrations or amounts, as necessary or desired. Cell culture medium solutions provide at least one component from one or more of the following categories: (1) an energy source, usually in the form of a carbohydrate such as glucose; (2) all essential amino acids, and usually the basic set of twenty amino acids plus cysteine; (3) vitamins and/or other organic compounds required at low concentrations; (4) free fatty acids or lipids, for example linoleic acid; and (5) trace elements, where trace elements are defined as inorganic compounds or naturally occurring elements that can be required at very low concentrations, usually in the micromolar range.

[0129] The medium also can be supplemented electively with one or more components from any of the following categories: (1) salts, for example, magnesium, calcium, and phosphate; (2) hormones and other growth factors such as, serum, insulin, transferrin, and epidermal growth factor; (3) protein and tissue hydrolysates, for example peptone or peptone mixtures which can be obtained from purified gelatin, plant material, or animal byproducts; (4) nucleosides and bases such as, adenosine, thymidine, and hypoxanthine; (5) buffers, such as HEPES; (6) antibiotics, such as gentamycin or ampicillin; (7) cell protective agents, for example pluronic polyol; and (8) galactose. In one embodiment, soluble factors can be added to the culturing medium.

[0130] The mammalian cell culture that can be used with the present invention is prepared in a medium suitable for the type of cell being cultured. In one embodiment, the cell culture medium can be any one of those previously discussed (for example, MEM) that is supplemented with serum from a mammalian source (for example, fetal bovine serum (FBS)). In another embodiment, the medium can be a conditioned medium to sustain the growth of epithelial cells or cells obtained from the hair bulb of a hair follicle (such as dermal papilla cells or dermal sheath cells). For example, epithelial cells can be cultured according to Barnes and Mather in Animal Cell Culture Methods (Academic Press, 1998), which is hereby incorporated by reference in its entirety. In a further embodiment, epithelial cells or hair follicle cells can be transfected with DNA vectors containing genes that encode a polypeptide or protein of interest (for example, an APCDD1 molecule). In other embodiments of the invention, cells are grown in a suspension culture (for example, a three-dimensional culture such as a hanging drop culture) in the presence of an effective amount of enzyme, wherein the enzyme substrate is an extracellular matrix molecule in the suspension culture. For example, the enzyme can be a hyaluronidase. Epithelial cells or hair follicle cells can be cultivated according to methods practiced in the art, for example, as those described in PCT application publication WO 2004/044188 and in U.S. Patent Application Publication No. 2005/0272150, or as described by Harris in Handbook in Practical Animal Cell Biology: Epithelial Cell Culture (Cambridge Univ. Press, Great Britain; 1996; see Chapter 8), which are hereby incorporated by reference.

[0131] A suspension culture is a type of culture wherein cells, or aggregates of cells (such as aggregates of DP cells), multiply while suspended in liquid medium. A suspension culture comprising mammalian cells can be used for the maintenance of cell types that do not adhere or to enable cells to manifest specific cellular characteristics that are not seen in the adherent form. Some types of suspension cultures can include three-dimensional cultures or a hanging drop culture. A hanging-drop culture is a culture in which the material to be cultivated is inoculated into a drop of fluid attached to a flat surface (such as a coverglass, glass slide, Petri dish, flask, and the like), and can be inverted over a hollow surface. Cells in a hanging drop can aggregate toward the hanging center of a drop as a result of gravity. However, according to the methods of the invention, cells cultured in the presence of a protein that degrades the extracellular matrix (such as collagenase, chondroitinase, hyaluronidase, and the like) will become more compact and aggregated within the hanging drop culture, for degradation of the ECM will allow cells to become closer in proximity to one another since less of the ECM will be present. See also International PCT Publication No. WO2007/100870, which is incorporated by reference.

[0132] Cells obtained from the hair bulb of a hair follicle (such as dermal papilla cells or dermal sheath cells) can be cultured as a single, homogenous population (for example, comprising DP cells) in a hanging drop culture so as to generate an aggregate of DP cells. Cells can also be cultured as a heterogeneous population (for example, comprising DP and DS cells) in a hanging drop culture so as to generate a chimeric aggregate of DP and DS cells. Epithelial cells can be cultured as a monolayer to confluency as practiced in the art. Such culturing methods can be carried out essentially according to methods described in Chapter 8 of the Handbook in Practical Animal Cell Biology: Epithelial Cell Culture (Cambridge Univ. Press, Great Britain; 1996); Underhill C B, J Invest Dermatol, 1993, 101(6):820-6); in Armstrong and Armstrong, (1990) J Cell Biol 110:1439-55; or in Animal Cell Culture Methods (Academic Press, 1998), which are all hereby incorporated by reference in their entireties.

[0133] Three-dimensional cultures can be formed from agar (such as Gey's Agar), hydrogels (such as matrigel, agarose, and the like; Lee et al., (2004) Biomaterials 25: 2461-2466) or polymers that are cross-linked. These polymers can comprise natural polymers and their derivatives, synthetic polymers and their derivatives, or a combination thereof. Natural polymers can be anionic polymers, cationic polymers, amphipathic polymers, or neutral polymers. Non-limiting examples of anionic polymers can include hyaluronic acid, alginic acid (alginate), carageenan, chondroitin sulfate, dextran sulfate, and pectin. Some examples of cationic polymers, include but are not limited to, chitosan or polylysine. (Peppas et al., (2006) Adv Mater. 18: 1345-60; Hoffman, A. S., (2002) Adv Drug Deliv Rev. 43: 3-12; Hoffman, A. S., (2001) Ann NY Acad Sci 944: 62-73). Examples of amphipathic polymers can include, but are not limited to collagen, gelatin, fibrin, and carboxymethyl chitin. Non-limiting examples of neutral polymers can include dextran, agarose, or pullulan. (Peppas et al., (2006) Adv Mater. 18: 1345-60; Hoffman, A. S., (2002) Adv Drug Deliv Rev. 43: 3-12; Hoffman, A. S., (2001) Ann NY Acad Sci 944: 62-73).

[0134] Cells suitable for culturing according to methods of the invention can harbor introduced expression vectors, such as plasmids. The expression vector constructs can be introduced via transformation, microinjection, transfection, lipofection, electroporation, or infection. The expression vectors can contain coding sequences, or portions thereof, encoding the proteins for expression and production. Expression vectors containing sequences encoding the produced proteins and polypeptides, as well as the appropriate transcriptional and translational control elements, can be generated using methods well known to and practiced by those skilled in the art. These methods include synthetic techniques, in vitro recombinant DNA techniques, and in vivo genetic recombination which are described in J. Sambrook et al., 1989, Molecular Cloning, A Laboratory Manual, Cold Spring Harbor Press, Plainview, N.Y. and in F. M. Ausubel et al., 1989, Current Protocols in Molecular Biology, John Wiley & Sons, New York, N.Y.

[0135] Obtaining and Purifying Polypeptides

[0136] An APCDD1 polypeptide molecule or a variant thereof, can be obtained by purification from human cells expressing an APCDD1 molecule by in vitro or in vivo expression of a nucleic acid sequence encoding an APCDD1 molecule; or by direct chemical synthesis.

[0137] Detecting Polypeptide Expression

[0138] Host cells which contain a nucleic acid encoding an APCDD1 molecule, and which subsequently express APCDD1, can be identified by various procedures known to those of skill in the art. These procedures include, but are not limited to, DNA-DNA or DNA-RNA hybridizations and protein bioassay or immunoassay techniques which include membrane, solution, or chip-based technologies for the detection and/or quantification of nucleic acid or protein. For example, the presence of a nucleic acid encoding an APCDD1 molecule can be detected by DNA-DNA or DNA-RNA hybridization or amplification using probes or fragments of nucleic acids encoding an APCDD1 molecule. In one embodiment, an APCDD1 fragment can encompass any portion of at least about 8 consecutive nucleotides of SEQ ID NO: 2. In another embodiment, the fragment can comprise at least about 10 consecutive nucleotides, at least about 15 consecutive nucleotides, at least about 20 consecutive nucleotides, or at least about 30 consecutive nucleotides of SEQ ID NO: 2. Fragments can include all possible nucleotide lengths between about 8 and about 100 nucleotides, for example, lengths between about 15 and about 100 nucleotides, or between about 20 and about 100 nucleotides. Nucleic acid amplification-based assays involve the use of oligonucleotides selected from sequences encoding an APCDD1 polypeptide to detect transformants which contain a nucleic acid encoding an APCDD1 molecule.

[0139] Protocols for detecting and measuring the expression of an APCDD1 polypeptide using either polyclonal or monoclonal antibodies specific for the polypeptide are well established. Non-limiting examples include enzyme-linked immunosorbent assay (ELISA), radioimmunoassay (RIA), and fluorescence activated cell sorting (FACS). A two-site, monoclonal-based immunoassay using monoclonal antibodies reactive to two non-interfering epitopes on an APCDD1 polypeptide can be used, or a competitive binding assay can be employed.

[0140] Labeling and conjugation techniques are known by those skilled in the art and can be used in various nucleic acid and amino acid assays. Methods for producing labeled hybridization or PCR probes for detecting sequences related to nucleic acid sequences encoding APCDD1 include, but are not limited to, oligolabeling, nick translation, end-labeling, or PCR amplification using a labeled nucleotide. Alternatively, nucleic acid sequences encoding an APCDD1 polypeptide can be cloned into a vector for the production of an mRNA probe. Such vectors are known in the art, are commercially available, and can be used to synthesize RNA probes in vitro by addition of labeled nucleotides and an appropriate RNA polymerase such as T7, T3, or SP6. These procedures can be conducted using a variety of commercially available kits (Amersham Pharmacia Biotech, Promega, and US Biochemical). Suitable reporter molecules or labels which can be used for ease of detection include radionuclides, enzymes, and fluorescent, chemiluminescent, or chromogenic agents, as well as substrates, cofactors, inhibitors, and/or magnetic particles.

[0141] Expression and Purification of Polypeptides

[0142] Host cells transformed with a nucleic acid sequence encoding an APCDD1 molecule can be cultured under conditions suitable for the expression and recovery of the protein from cell culture. The polypeptide produced by a transformed cell can be secreted or contained intracellularly depending on the sequence and/or the vector used. Expression vectors containing a nucleic acid sequence encoding an APCDD1 molecule can be designed to contain signal sequences which direct secretion of soluble APCDD1 polypeptide molecules or a variant thereof, through a prokaryotic or eukaryotic cell membrane or which direct the membrane insertion of membrane-bound APCDD1 polypeptide molecule or a variant thereof.

[0143] Other constructions can also be used to join a sequence encoding an APCDD1 polypeptide to a nucleotide sequence encoding a polypeptide domain which will facilitate purification of soluble proteins. Such purification facilitating domains include, but are not limited to, metal chelating peptides such as histidine-tryptophan modules that allow purification on immobilized metals, protein A domains that allow purification on immobilized immunoglobulin, and the domain utilized in the FLAGS extension/affinity purification system (Immunex Corp., Seattle, Wash.). Including cleavable linker sequences (i.e., those specific for Factor Xa or enterokinase (Invitrogen, San Diego, Calif.)) between the purification domain and an APCDD1 polypeptide also can be used to facilitate purification. One such expression vector provides for expression of a fusion protein containing APCDD1 and 6 histidine residues preceding a thioredoxin or an enterokinase cleavage site. The histidine residues facilitate purification by immobilized metal ion affinity chromatography, while the enterokinase cleavage site provides a means for purifying the APCDD1 polypeptide.

[0144] An APCDD1 polypeptide molecule can be purified from any human or non-human cell which expresses the polypeptide molecule, including those which have been transfected with expression constructs that express an APCDD1 molecule. A purified APCDD1 molecule can be separated from other compounds which normally associate with APCDD1 in the cell, such as certain proteins, carbohydrates, or lipids, using methods practiced in the art. Non-limiting methods include size exclusion chromatography, ammonium sulfate fractionation, ion exchange chromatography, affinity chromatography, and preparative gel electrophoresis.

[0145] Chemical Synthesis

[0146] Nucleic acid sequences encoding an APCDD1 polypeptide can be synthesized, in whole or in part, using chemical methods known in the art. Alternatively, an APCDD1 molecule can be produced using chemical methods to synthesize its amino acid sequence, such as by direct peptide synthesis using solid-phase techniques. Protein synthesis can either be performed using manual techniques or by automation. Automated synthesis can be achieved, for example, using Applied Biosystems 431A Peptide Synthesizer (Perkin Elmer). Optionally, fragments of APCDD1 molecules (such as those comprising APCDD1 nucleic acid or amino acid sequences) can be separately synthesized and combined using chemical methods to produce a full-length molecule. In one embodiment, an APCDD1 fragment can encompass any portion of at least about 8 consecutive nucleotides of SEQ ID NO: 2. In one embodiment, the fragment can comprise at least about 10 nucleotides, at least about 15 nucleotides, at least about 20 nucleotides, or at least about 30 nucleotides of SEQ ID NO: 2. Fragments include all possible nucleotide lengths between about 8 and about 100 nucleotides, for example, lengths between about 15 and about 100 nucleotides, or between about 20 and about 100 nucleotides.

[0147] An APCDD1 fragment can also be a fragment of an APCDD1 protein. For example, the APCDD1 fragment can encompass any portion of at least about 8 consecutive amino acids of SEQ ID NO: 1. The fragment can comprise at least about 10 consecutive amino acids, at least about 20 consecutive amino acids, at least about 30 consecutive amino acids, at least about 40 consecutive amino acids, a least about 50 consecutive amino acids, at least about 60 consecutive amino acids, at least about 70 consecutive amino acids, or at least about 75 consecutive amino acids of SEQ ID NO: 1. Fragments include all possible amino acid lengths between about 8 and 100 about amino acids, for example, lengths between about 10 and about 100 amino acids, between about 15 and about 100 amino acids, between about 20 and about 100 amino acids, between about 35 and about 100 amino acids, between about 40 and about 100 amino acids, between about 50 and about 100 amino acids, between about 70 and about 100 amino acids, between about 75 and about 100 amino acids, or between about 80 and about 100 amino acids.

[0148] The newly synthesized peptide can be substantially purified via high performance liquid chromatography (HPLC). The composition of a synthetic APCDD1 molecule can be confirmed by amino acid analysis or sequencing. Additionally, any portion of the amino acid sequence of APCDD1 can be altered during direct synthesis and/or combined using chemical methods with sequences from other proteins to produce a variant polypeptide or a fusion protein.

[0149] Identifying APCDD1 Modulating Compounds

[0150] The invention provides methods for identifying compounds which can be used for controlling and/or regulating hair growth (for example, hair density) or hair pigmentation in a subject. In addition, the invention provides methods for identifying compounds which can be used for the treatment of a hair loss disorder. The invention also provides methods for identifying compounds which can be used for the treatment of hypertrichosis. The invention also provides methods for identifying compounds which can be used for the treatment of hypotrichosis (for example, hereditary hypotrichosis simplex (HHS)). Non-limiting examples of hair loss disorders include: androgenetic alopecia, Alopecia greata, telogen effluvium, Alopecia greata, alopecia totalis, and alopecia universalis. The methods can comprise the identification of test compounds or agents (e.g., peptides (such as antibodies or fragments thereof), small molecules, nucleic acids (such as siRNA or antisense RNA), or other agents) that can bind to an APCDD1 polypeptide molecule and/or have a stimulatory or inhibitory effect on the biological activity of APCDD1 or its expression, and subsequently determining whether these compounds can regulate hair growth in a subject or can have an effect on symptoms associated with the hair loss disorders in an in vivo assay (i.e., examining an increase or reduction in hair growth).

[0151] As used herein, an “APCDD1 modulating compound” refers to a compound that interacts with an APCDD1 polypeptide molecule and modulates its Wnt/β-catenin signaling activity and/or its expression. The compound can either increase APCDD1's activity or expression. Conversely, the compound can decrease APCDD1's activity or expression. The compound can be an APCDD1 agonist or an APCDD1 antagonist. Some non-limiting examples of APCDD1 modulating compounds include peptides (such as APCDD1 peptide fragments, or antibodies or fragments thereof), small molecules, and nucleic acids (such as APCDD1 siRNA or antisense RNA specific for APCDD1 nucleic acid). Agonists of an APCDD1 molecule can be molecules which, when bound to APCDD1, increase or prolong the activity of an APCDD1 molecule. Agonists of APCDD1 include, but are not limited to, proteins, nucleic acids, small molecules, or any other molecule which activates APCDD1. Antagonists of an APCDD1 molecule can be molecules which, when bound to APCDD1 or a variant thereof, decrease the amount or the duration of the activity of an APCDD1 molecule. Antagonists include proteins, nucleic acids, antibodies, small molecules, or any other molecule which decrease the activity of APCDD1.

[0152] The term “modulate,” as it appears herein, refers to a change in the activity or expression of an APCDD1 molecule. For example, modulation can cause an increase or a decrease in protein activity, binding characteristics, or any other biological, functional, or immunological properties of an APCDD1 molecule.

[0153] In one embodiment, an APCDD1 modulating compound can be a peptide fragment of an APCDD1 protein that binds to the protein. For example, the APCDD1 molecule can encompass any portion of at least about 8 consecutive amino acids of SEQ ID NO: 1. The fragment can comprise at least about 10 consecutive amino acids, at least about 20 consecutive amino acids, at least about 30 consecutive amino acids, at least about 40 consecutive amino acids, at least about 50 consecutive amino acids, at least about 60 consecutive amino acids, or at least about 75 consecutive amino acids of SEQ ID NO: 1. Fragments include all possible amino acid lengths between and including about 8 and about 100 amino acids, for example, lengths between about 10 and about 100 amino acids, between about 15 and about 100 amino acids, between about 20 and about 100 amino acids, between about 35 and about 100 amino acids, between about 40 and about 100 amino acids, between about 50 and about 100 amino acids, between about 70 and about 100 amino acids, between about 75 and about 100 amino acids, or between about 80 and about 100 amino acids. These peptide fragments can be obtained commercially or synthesized via liquid phase or solid phase synthesis methods (Atherton et al., (1989) Solid Phase Peptide Synthesis: a Practical Approach. IRL Press, Oxford, England). The APCDD1 peptide fragments can be isolated from a natural source, genetically engineered, or chemically prepared. These methods are well known in the art.

[0154] An APCDD1 modulating compound can also be a protein, such as an antibody (monoclonal, polyclonal, humanized, chimeric, or fully human), or a binding fragment thereof, directed against APCDD1. An antibody fragment can be a form of an antibody other than the full-length form and includes portions or components that exist within full-length antibodies, in addition to antibody fragments that have been engineered. Antibody fragments can include, but are not limited to, single chain Fv (scFv), diabodies, Fv, and (Fab)₂, triabodies, Fc, Fab, CDR1, CDR2, CDR3, combinations of CDR's, variable regions, tetrabodies, bifunctional hybrid antibodies, framework regions, constant regions, and the like (see, Maynard et al., (2000) Ann. Rev. Biomed. Eng. 2:339-76; Hudson (1998) Curr. Opin. Biotechnol. 9:395-402). Antibodies can be obtained commercially, custom generated, or synthesized against an antigen of interest according to methods established in the art (Janeway et al., (2001) Immunobiology, 5th ed., Garland Publishing).

[0155] Inhibition of RNA encoding APCDD1 can effectively modulate the expression of the APCDD1 gene from which the RNA is transcribed. Inhibitors are selected from the group comprising: siRNA; interfering RNA or RNAi; dsRNA; RNA Polymerase III transcribed DNAs; ribozymes; and antisense nucleic acids, which can be RNA, DNA, or an artificial nucleic acid.

[0156] Antisense oligonucleotides, including antisense DNA, RNA, and DNA/RNA molecules, act to directly block the translation of mRNA by binding to targeted mRNA and preventing protein translation. For example, antisense oligonucleotides of at least about 15 bases and complementary to unique regions of the DNA sequence encoding an APCDD1 polypeptide can be synthesized, e.g., by conventional phosphodiester techniques (Dallas et al., (2006) Med. Sci. Monit. 12(4):RA67-74; Kalota et al., (2006) Handb. Exp. Pharmacol. 173:173-96; Lutzelburger et al., (2006) Handb. Exp. Pharmacol. 173:243-59). Antisense nucleotide sequences include, but are not limited to: morpholinos, 2′-O-methyl polynucleotides, DNA, RNA and the like.

[0157] siRNA comprises a double stranded structure containing from about 15 to about 50 base pairs, for example from about 21 to about 25 base pairs, and having a nucleotide sequence identical or nearly identical to an expressed target gene or RNA within the cell. The siRNA comprise a sense RNA strand and a complementary antisense RNA strand annealed together by standard Watson-Crick base-pairing interactions. The sense strand comprises a nucleic acid sequence which is substantially identical to a nucleic acid sequence contained within the target miRNA molecule. “Substantially identical” to a target sequence contained within the target mRNA refers to a nucleic acid sequence that differs from the target sequence by about 3% or less. The sense and antisense strands of the siRNA can comprise two complementary, single-stranded RNA molecules, or can comprise a single molecule in which two complementary portions are base-paired and are covalently linked by a single-stranded “hairpin” area. See also, McMnaus and Sharp (2002) Nat Rev Genetics, 3:737-47, and Sen and Blau (2006) FASEB J., 20:1293-99, the entire disclosures of which are herein incorporated by reference.

[0158] The siRNA can also be altered RNA that differs from naturally-occurring RNA by the addition, deletion, substitution and/or alteration of one or more nucleotides. Such alterations can include addition of non-nucleotide material, such as to the end(s) of the siRNA or to one or more internal nucleotides of the siRNA, or modifications that make the siRNA resistant to nuclease digestion, or the substitution of one or more nucleotides in the siRNA with deoxyribonucleotides. One or both strands of the siRNA can also comprise a 3′ overhang. As used herein, a 3′ overhang refers to at least one unpaired nucleotide extending from the 3′-end of a duplexed RNA strand. For example, the siRNA can comprise at least one 3′ overhang of from 1 to about 6 nucleotides (which includes ribonucleotides or deoxyribonucleotides) in length, or from 1 to about 5 nucleotides in length, or from 1 to about 4 nucleotides in length, or from about 2 to about 4 nucleotides in length. For example, each strand of the siRNA can comprise 3′ overhangs of dithymidylic acid (“TT”) or diuridylic acid (“uu”).

[0159] siRNA can be produced chemically or biologically, or can be expressed from a recombinant plasmid or viral vector (for example, see U.S. Pat. No. 7,294,504 and U.S. Pat. No. 7,422,896, the entire disclosures of which are herein incorporated by reference). Exemplary methods for producing and testing dsRNA or siRNA molecules are described in U.S. Patent Application Publication No. 2002/0173478 to Gewirtz, U.S. Patent Application Publication No. 2007/0072204 to Hannon et al., and in U.S. Patent Application Publication No. 2004/0018176 to Reich et al., the entire disclosures of which are herein incorporated by reference.

[0160] In one embodiment, an siRNA directed to human APCDD1 can comprise any one of SEQ ID NOS: 112-3776. Table 1 lists siRNA sequences comprising SEQ ID NOS: 112-3776.

[0161] In another embodiment, an siRNA directed to mouse APCDD1 can comprise any one of SEQ ID NOS: 3777-9338. Table 2 lists siRNA sequences comprising SEQ ID NOS: 3777-9338.

TABLE 1
List of siRNAs directed to human APCDD1.

| | | | | | | | |
|---|---|---|---|---|---|---|---|
| | SEQ | | | | | | |
| | ID | | SEQ ID | | SEQ | | SEQ ID |
| Sense (5′-3′) | NO: | Anti-sense (5′-3′) | NO: | Sense (5′-3′) | ID NO: | Anti-sense (5′-3′) | NO: |

| | | | | | | | |
|---|---|---|---|---|---|---|---|
| gaaatatgaagagacgctg | 112 | cagcgtctcttcatatttc | 1046 | acggctgtgagtgcaccaa | 1980 | ttggtgcactcacagccgt | 2879 |
| aaatatgaagagacgctgc | 113 | gcagcgtctcttcatattt | 1047 | cggctgtgagtgcaccaag | 1981 | cttggtgcactcacagccg | 2880 |
| aatatgaagagacgctgca | 114 | tgcagcgtctcttcatatt | 1048 | ggctgtgagtgcaccaagg | 1982 | ccttggtgcactcacagcc | 2881 |
| atatgaagagacgctgcag | 115 | ctgcagcgtctcttcatat | 1049 | gctgtgagtgcaccaaggc | 1983 | gccttggtgcactcacagc | 2882 |
| tatgaagagacgctgcagc | 116 | gctgcagcgtctcttcata | 1050 | ctgtgagtgcaccaaggcc | 1984 | ggccttggtgcactcacag | 2883 |
| atgaagagacgctgcagct | 117 | agctgcagcgtctcttcat | 1051 | tgtgagtgcaccaaggccg | 1985 | cggccttggtgcactcaca | 2884 |
| tgaagagacgctgcagctg | 118 | cagctgcagcgtctcttca | 1052 | gtgagtgcaccaaggccgt | 1986 | acggccttggtgcactcac | 2885 |
| gaagagacgctgcagctgc | 119 | gcagctgcagcgtctcttc | 1053 | tgagtgcaccaaggccgtg | 1987 | cacggccttggtgcactca | 2886 |
| aagagacgctgcagctgcg | 120 | cgcagctgcagcgtctctt | 1054 | gagtgcaccaaggccgtga | 1988 | tcacggccttggtgcactc | 2887 |
| agagacgctgcagctgcgg | 121 | ccgcagctgcagcgtctct | 1055 | agtgcaccaaggccgtgaa | 1989 | ttcacggccttggtgcact | 2888 |
| gagacgctgcagctgcggt | 122 | accgcagctgcagcgtctc | 1056 | gtgcaccaaggccgtgaac | 1990 | gttcacggccttggtgcac | 2889 |
| agacgctgcagctgcggtg | 123 | caccgcagctgcagcgtct | 1057 | tgcaccaaggccgtgaact | 1991 | agttcacggccttggtgca | 2890 |
| gacgctgcagctgcggtgg | 124 | ccaccgcagctgcagcgtc | 1058 | gcaccaaggccgtgaactt | 1992 | aagttcacggccttggtgc | 2891 |
| acgctgcagctgcggtggc | 125 | gccaccgcagctgcagcgt | 1059 | caccaaggccgtgaacttt | 1993 | aaagttcacggccttggtg | 2892 |
| cgctgcagctgcggtggcg | 126 | cgccaccgcagctgcagcg | 1060 | accaaggccgtgaactttg | 1994 | caaagttcacggccttggt | 2893 |
| gctgcagctgcggtggcgg | 127 | ccgccaccgcagctgcagc | 1061 | ccaaggccgtgaactttgc | 1995 | gcaaagttcacggccttgg | 2894 |
| ctgcagctgcggtggcggt | 128 | accgccaccgcagctgcag | 1062 | caaggccgtgaactttgcc | 1996 | ggcaaagttcacggccttg | 2895 |
| tgcagctgcggtggcggtg | 129 | caccgccaccgcagctgca | 1063 | aaggccgtgaactttgcca | 1997 | tggcaaagttcacggcctt | 2896 |
| gcagctgcggtggcggtgg | 130 | ccaccgccaccgcagctgc | 1064 | aggccgtgaactttgccat | 1998 | atggcaaagttcacggcct | 2897 |
| cagctgcggtggcggtggc | 131 | gccaccgccaccgcagctg | 1065 | ggccgtgaactttgccatg | 1999 | catggcaaagttcacggcc | 2898 |
| agctgcggtggcggtggcg | 132 | cgccaccgccaccgcagct | 1066 | gccgtgaactttgccatgc | 2000 | gcatggcaaagttcacggc | 2899 |
| gctgcggtggcggtggcgg | 133 | ccgccaccgccaccgcagc | 1067 | ccgtgaactttgccatgca | 2001 | tgcatggcaaagttcacgg | 2900 |
| ctgcggtggcggtggcggc | 134 | gccgccaccgccaccgcag | 1068 | cgtgaactttgccatgcat | 2002 | atgcatggcaaagttcacg | 2901 |
| tgcggtggcggtggcggcc | 135 | ggccgccaccgccaccgca | 1069 | gtgaactttgccatgcatg | 2003 | catgcatggcaaagttcac | 2902 |
| gcggtggcggtggcggcca | 136 | tggccgccaccgccaccgc | 1070 | tgaactttgccatgcatga | 2004 | tcatgcatggcaaagttca | 2903 |
| cggtggcggtggcggccac | 137 | gtggccgccaccgccaccg | 1071 | gaactttgccatgcatgaa | 2005 | ttcatgcatggcaaagttc | 2904 |
| ggtggcggtggcggccact | 138 | agtggccgccaccgccacc | 1072 | aactttgccatgcatgaac | 2006 | gttcatgcatggcaaagtt | 2905 |
| gtggcggtggcggccactg | 139 | cagtggccgccaccgccac | 1073 | actttgccatgcatgaact | 2007 | agttcatgcatggcaaagt | 2906 |
| tggcggtggcggccactgc | 140 | gcagtggccgccaccgcca | 1074 | ctttgccatgcatgaactt | 2008 | aagttcatgcatggcaaag | 2907 |
| ggcggtggcggccactgca | 141 | tgcagtggccgccaccgcc | 1075 | tttgccatgcatgaacttc | 2009 | gaagttcatgcatggcaaa | 2908 |
| gcggtggcggccactgcag | 142 | ctgcagtggccgccaccgc | 1076 | ttgccatgcatgaacttca | 2010 | tgaagttcatgcatggcaa | 2909 |
| cggtggcggccactgcagc | 143 | gctgcagtggccgccaccg | 1077 | tgccatgcatgaacttcag | 2011 | ctgaagttcatgcatggca | 2910 |
| ggtggcggccactgcagct | 144 | agctgcagtggccgccacc | 1078 | gccatgcatgaacttcagc | 2012 | gctgaagttcatgcatggc | 2911 |
| gtggcggccactgcagctc | 145 | gagctgcagtggccgccac | 1079 | ccatgcatgaacttcagct | 2013 | agctgaagttcatgcatgg | 2912 |
| tggcggccactgcagctca | 146 | tgagctgcagtggccgcca | 1080 | catgcatgaacttcagctc | 2014 | gagctgaagttcatgcatg | 2913 |
| ggcggccactgcagctcag | 147 | ctgagctgcagtggccgcc | 1081 | atgcatgaacttcagctca | 2015 | tgagctgaagttcatgcat | 2914 |
| gcggccactgcagctcaga | 148 | tctgagctgcagtggccgc | 1082 | tgcatgaacttcagctcat | 2016 | atgagctgaagttcatgca | 2915 |
| cggccactgcagctcagag | 149 | ctctgagctgcagtggccg | 1083 | gcatgaacttcagctcatc | 2017 | gatgagctgaagttcatgc | 2916 |
| ggccactgcagctcagagc | 150 | gctctgagctgcagtggcc | 1084 | catgaacttcagctcatcc | 2018 | ggatgagctgaagttcatg | 2917 |
| gccactgcagctcagagcg | 151 | cgctctgagctgcagtggc | 1085 | atgaacttcagctcatccg | 2019 | cggatgagctgaagttcat | 2918 |
| ccactgcagctcagagcgg | 152 | ccgctctgagctgcagtgg | 1086 | tgaacttcagctcatccgg | 2020 | ccggatgagctgaagttca | 2919 |
| cactgcagctcagagcggc | 153 | gccgctctgagctgcagtg | 1087 | gaacttcagctcatccggg | 2021 | cccggatgagctgaagttc | 2920 |
| actgcagctcagagcggcg | 154 | cgccgctctgagctgcagt | 1088 | aacttcagctcatccgggt | 2022 | acccggatgagctgaagtt | 2921 |
| ctgcagctcagagcggcgc | 155 | gcgccgctctgagctgcag | 1089 | acttcagctcatccgggtg | 2023 | cacccggatgagctgaagt | 2922 |
| tgcagctcagagcggcgca | 156 | tgcgccgctctgagctgca | 1090 | cttcagctcatccgggtgg | 2024 | ccacccggatgagctgaag | 2923 |
| gcagctcagagcggcgcac | 157 | gtgcgccgctctgagctgc | 1091 | ttcagctcatccgggtgga | 2025 | tccacccggatgagctgaa | 2924 |
| cagctcagagcggcgcacg | 158 | cgtgcgccgctctgagctg | 1092 | tcagctcatccgggtggag | 2026 | ctccacccggatgagctga | 2925 |
| agctcagagcggcgcacgc | 159 | gcgtgcgccgctctgagct | 1093 | cagctcatccgggtggaga | 2027 | tctccacccggatgagctg | 2926 |
| gctcagagcggcgcacgcg | 160 | cgcgtgcgccgctctgagc | 1094 | agctcatccgggtggagaa | 2028 | ttctccacccggatgagct | 2927 |
| ctcagagcggcgcacgcgg | 161 | ccgcgtgcgccgctctgag | 1095 | gctcatccgggtggagaag | 2029 | cttctccacccggatgagc | 2928 |
| tcagagcggcgcacgcggc | 162 | gccgcgtgcgccgctctga | 1096 | ctcatccgggtggagaagc | 2030 | gcttctccacccggatgag | 2929 |
| cagagcggcgcacgcggcg | 163 | cgccgcgtgcgccgctctg | 1097 | tcatccgggtggagaagca | 2031 | tgcttctccacccggatga | 2930 |
| agagcggcgcacgcggcgg | 164 | ccgccgcgtgcgccgctct | 1098 | catccgggtggagaagcag | 2032 | ctgcttctccacccggatg | 2931 |
| gagcggcgcacgcggcggc | 165 | gccgccgcgtgcgccgctc | 1099 | atccgggtggagaagcagt | 2033 | actgcttctccacccggat | 2932 |
| agcggcgcacgcggcggcc | 166 | ggccgccgcgtgcgccgct | 1100 | tccgggtggagaagcagta | 2034 | tactgcttctccacccgga | 2933 |
| gcggcgcacgcggcggccg | 167 | cggccgccgcgtgcgccgc | 1101 | ccgggtggagaagcagtac | 2035 | gtactgcttctccacccgg | 2934 |
| cggcgcacgcggcggccgg | 168 | ccggccgccgcgtgcgccg | 1102 | cgggtggagaagcagtacc | 2036 | ggtactgcttctccacccg | 2935 |
| ggcgcacgcggcggccggg | 169 | cccggccgccgcgtgcgcc | 1103 | gggtggagaagcagtacct | 2037 | aggtactgcttctccaccc | 2936 |
| gcgcacgcggcggccgggg | 170 | ccccggccgccgcgtgcgc | 1104 | ggtggagaagcagtacctt | 2038 | aaggtactgcttctccacc | 2937 |
| cgcacgcggcggccggggc | 171 | gccccggccgccgcgtgcg | 1105 | gtggagaagcagtaccttc | 2039 | gaaggtactgcttctccac | 2938 |
| gcacgcggcggccggggcg | 172 | cgccccggccgccgcgtgc | 1106 | tggagaagcagtaccttca | 2040 | tgaaggtactgcttctcca | 2939 |
| cacgcggcggccggggcgg | 173 | ccgccccggccgccgcgtg | 1107 | ggagaagcagtaccttcac | 2041 | gtgaaggtactgcttctcc | 2940 |
| acgcggcggccggggcggg | 174 | cccgccccggccgccgcgt | 1108 | gagaagcagtaccttcacc | 2042 | ggtgaaggtactgcttctc | 2941 |
| cgcggcggccggggcggga | 175 | tcccgccccggccgccgcg | 1109 | agaagcagtaccttcacca | 2043 | tggtgaaggtactgcttct | 2942 |
| gcggcggccggggcgggac | 176 | gtcccgccccggccgccgc | 1110 | gaagcagtaccttcaccac | 2044 | gtggtgaaggtactgcttc | 2943 |
| cggcggccggggcgggacg | 177 | cgtcccgccccggccgccg | 1111 | aagcagtaccttcaccaca | 2045 | tgtggtgaaggtactgctt | 2944 |
| ggcggccggggcgggacgc | 178 | gcgtcccgccccggccgcc | 1112 | agcagtaccttcaccacaa | 2046 | ttgtggtgaaggtactgct | 2945 |
| gcggccggggcgggacgcg | 179 | cgcgtcccgccccggccgc | 1113 | gcagtaccttcaccacaac | 2047 | gttgtggtgaaggtactgc | 2946 |
| cggccggggcgggacgcgg | 180 | ccgcgtcccgccccggccg | 1114 | cagtaccttcaccacaacc | 2048 | ggttgtggtgaaggtactg | 2947 |
| ggccggggcgggacgcggg | 181 | cccgcgtcccgccccggcc | 1115 | agtaccttcaccacaacct | 2049 | aggttgtggtgaaggtact | 2948 |
| gccggggcgggacgcgggg | 182 | ccccgcgtcccgccccggc | 1116 | gtaccttcaccacaacctc | 2050 | gaggttgtggtgaaggtac | 2949 |
| ccggggcgggacgcggggc | 183 | gccccgcgtcccgccccgg | 1117 | taccttcaccacaacctcg | 2051 | cgaggttgtggtgaaggta | 2950 |
| cggggcgggacgcggggcc | 184 | ggccccgcgtcccgccccg | 1118 | accttcaccacaacctcga | 2052 | tcgaggttgtggtgaaggt | 2951 |
| ggggcgggacgcggggccg | 185 | cggccccgcgtcccgcccc | 1119 | ccttcaccacaacctcgac | 2053 | gtcgaggttgtggtgaagg | 2952 |
| gggcgggacgcggggccgg | 186 | ccggccccgcgtcccgccc | 1120 | cttcaccacaacctcgacc | 2054 | ggtcgaggttgtggtgaag | 2953 |
| ggcgggacgcggggccggg | 187 | cccggccccgcgtcccgcc | 1121 | ttcaccacaacctcgacca | 2055 | tggtcgaggttgtggtgaa | 2954 |
| gcgggacgcggggccgggc | 188 | gcccggccccgcgtcccgc | 1122 | tcaccacaacctcgaccac | 2056 | gtggtcgaggttgtggtga | 2955 |
| cgggacgcggggccgggcg | 189 | cgcccggccccgcgtcccg | 1123 | caccacaacctcgaccacc | 2057 | ggtggtcgaggttgtggtg | 2956 |
| gggacgcggggccgggcgc | 190 | gcgcccggccccgcgtccc | 1124 | accacaacctcgaccacct | 2058 | aggtggtcgaggttgtggt | 2957 |
| ggacgcggggccgggcgcg | 191 | cgcgcccggccccgcgtcc | 1125 | ccacaacctcgaccacctg | 2059 | caggtggtcgaggttgtgg | 2958 |
| gacgcggggccgggcgcgg | 192 | ccgcgcccggccccgcgtc | 1126 | cacaacctcgaccacctgg | 2060 | ccaggtggtcgaggttgtg | 2959 |
| acgcggggccgggcgcgga | 193 | tccgcgcccggccccgcgt | 1127 | acaacctcgaccacctggt | 2061 | accaggtggtcgaggttgt | 2960 |
| cgcggggccgggcgcggag | 194 | ctccgcgcccggccccgcg | 1128 | caacctcgaccacctggtc | 2062 | gaccaggtggtcgaggttg | 2961 |
| gcggggccgggcgcggaga | 195 | tctccgcgcccggccccgc | 1129 | aacctcgaccacctggtcg | 2063 | cgaccaggtggtcgaggtt | 2962 |
| cggggccgggcgcggagaa | 196 | ttctccgcgcccggccccg | 1130 | acctcgaccacctggtcga | 2064 | tcgaccaggtggtcgaggt | 2963 |
| ggggccgggcgcggagaag | 197 | cttctccgcgcccggcccc | 1131 | cctcgaccacctggtcgag | 2065 | ctcgaccaggtggtcgagg | 2964 |
| gggccgggcgcggagaagt | 198 | acttctccgcgcccggccc | 1132 | ctcgaccacctggtcgagg | 2066 | cctcgaccaggtggtcgag | 2965 |
| ggccgggcgcggagaagtc | 199 | gacttctccgcgcccggcc | 1133 | tcgaccacctggtcgagga | 2067 | tcctcgaccaggtggtcga | 2966 |
| gccgggcgcggagaagtcg | 200 | cgacttctccgcgcccggc | 1134 | cgaccacctggtcgaggag | 2068 | ctcctcgaccaggtggtcg | 2967 |
| ccgggcgcggagaagtcgg | 201 | ccgacttctccgcgcccgg | 1135 | gaccacctggtcgaggagc | 2069 | gctcctcgaccaggtggtc | 2968 |
| cgggcgcggagaagtcggg | 202 | cccgacttctccgcgcccg | 1136 | accacctggtcgaggagct | 2070 | agctcctcgaccaggtggt | 2969 |
| gggcgcggagaagtcgggg | 203 | ccccgacttctccgcgccc | 1137 | ccacctggtcgaggagctc | 2071 | gagctcctcgaccaggtgg | 2970 |
| ggcgcggagaagtcggggc | 204 | gccccgacttctccgcgcc | 1138 | cacctggtcgaggagctct | 2072 | agagctcctcgaccaggtg | 2971 |
| gcgcggagaagtcggggcg | 205 | cgccccgacttctccgcgc | 1139 | acctggtcgaggagctctt | 2073 | aagagctcctcgaccaggt | 2972 |
| cgcggagaagtcggggcgg | 206 | ccgccccgacttctccgcg | 1140 | cctggtcgaggagctcttc | 2074 | gaagagctcctcgaccagg | 2973 |
| gcggagaagtcggggcggg | 207 | cccgccccgacttctccgc | 1141 | ctggtcgaggagctcttcc | 2075 | ggaagagctcctcgaccag | 2974 |
| cggagaagtcggggcgggc | 208 | gcccgccccgacttctccg | 1142 | tggtcgaggagctcttcct | 2076 | aggaagagctcctcgacca | 2975 |
| ggagaagtcggggcgggcg | 209 | cgcccgccccgacttctcc | 1143 | ggtcgaggagctcttcctt | 2077 | aaggaagagctcctcgacc | 2976 |
| gagaagtcggggcgggcgg | 210 | ccgcccgccccgacttctc | 1144 | gtcgaggagctcttccttg | 2078 | caaggaagagctcctcgac | 2977 |
| agaagtcggggcgggcggc | 211 | gccgcccgccccgacttct | 1145 | tcgaggagctcttccttgg | 2079 | ccaaggaagagctcctcga | 2978 |
| gaagtcggggcgggcggca | 212 | tgccgcccgccccgacttc | 1146 | cgaggagctcttccttggt | 2080 | accaaggaagagctcctcg | 2979 |
| aagtcggggcgggcggcag | 213 | ctgccgcccgccccgactt | 1147 | gaggagctcttccttggtg | 2081 | caccaaggaagagctcctc | 2980 |
| agtcggggcgggcggcaga | 214 | tctgccgcccgccccgact | 1148 | aggagctcttccttggtga | 2082 | tcaccaaggaagagctcct | 2981 |
| gtcggggcgggcggcagag | 215 | ctctgccgcccgccccgac | 1149 | ggagctcttccttggtgac | 2083 | gtcaccaaggaagagctcc | 2982 |
| tcggggcgggcggcagaga | 216 | tctctgccgcccgccccga | 1150 | gagctcttccttggtgaca | 2084 | tgtcaccaaggaagagctc | 2983 |
| cggggcgggcggcagagag | 217 | ctctctgccgcccgccccg | 1151 | agctcttccttggtgacat | 2085 | atgtcaccaaggaagagct | 2984 |
| ggggcgggcggcagagagg | 218 | cctctctgccgcccgcccc | 1152 | gctcttccttggtgacatt | 2086 | aatgtcaccaaggaagagc | 2985 |
| gggcgggcggcagagaggc | 219 | gcctctctgccgcccgccc | 1153 | ctcttccttggtgacattc | 2087 | gaatgtcaccaaggaagag | 2986 |
| ggcgggcggcagagaggcc | 220 | ggcctctctgccgcccgcc | 1154 | tcttccttggtgacattca | 2088 | tgaatgtcaccaaggaaga | 2987 |
| gcgggcggcagagaggccg | 221 | cggcctctctgccgcccgc | 1155 | cttccttggtgacattcac | 2089 | gtgaatgtcaccaaggaag | 2988 |
| cgggcggcagagaggccgg | 222 | ccggcctctctgccgcccg | 1156 | ttccttggtgacattcaca | 2090 | tgtgaatgtcaccaaggaa | 2989 |
| gggcggcagagaggccggg | 223 | cccggcctctctgccgccc | 1157 | tccttggtgacattcacac | 2091 | gtgtgaatgtcaccaagga | 2990 |
| ggcggcagagaggccggga | 224 | tcccggcctctctgccgcc | 1158 | ccttggtgacattcacact | 2092 | agtgtgaatgtcaccaagg | 2991 |
| gcggcagagaggccgggac | 225 | gtcccggcctctctgccgc | 1159 | cttggtgacattcacactg | 2093 | cagtgtgaatgtcaccaag | 2992 |
| cggcagagaggccgggacg | 226 | cgtcccggcctctctgccg | 1160 | ttggtgacattcacactga | 2094 | tcagtgtgaatgtcaccaa | 2993 |
| ggcagagaggccgggacgc | 227 | gcgtcccggcctctctgcc | 1161 | tggtgacattcacactgat | 2095 | atcagtgtgaatgtcacca | 2994 |
| gcagagaggccgggacgcg | 228 | cgcgtcccggcctctctgc | 1162 | ggtgacattcacactgatg | 2096 | catcagtgtgaatgtcacc | 2995 |
| cagagaggccgggacgcgg | 229 | ccgcgtcccggcctctctg | 1163 | gtgacattcacactgatgc | 2097 | gcatcagtgtgaatgtcac | 2996 |
| agagaggccgggacgcgga | 230 | tccgcgtcccggcctctct | 1164 | tgacattcacactgatgcc | 2098 | ggcatcagtgtgaatgtca | 2997 |
| gagaggccgggacgcggac | 231 | gtccgcgtcccggcctctc | 1165 | gacattcacactgatgcca | 2099 | tggcatcagtgtgaatgtc | 2998 |
| agaggccgggacgcggacc | 232 | ggtccgcgtcccggcctct | 1166 | acattcacactgatgccac | 2100 | gtggcatcagtgtgaatgt | 2999 |
| gaggccgggacgcggaccg | 233 | cggtccgcgtcccggcctc | 1167 | cattcacactgatgccacc | 2101 | ggtggcatcagtgtgaatg | 3000 |
| aggccgggacgcggaccgg | 234 | ccggtccgcgtcccggcct | 1168 | attcacactgatgccaccc | 2102 | gggtggcatcagtgtgaat | 3001 |
| ggccgggacgcggaccggg | 235 | cccggtccgcgtcccggcc | 1169 | ttcacactgatgccaccca | 2103 | tgggtggcatcagtgtgaa | 3002 |
| gccgggacgcggaccgggc | 236 | gcccggtccgcgtcccggc | 1170 | tcacactgatgccacccag | 2104 | ctgggtggcatcagtgtga | 3003 |
| ccgggacgcggaccgggcc | 237 | ggcccggtccgcgtcccgg | 1171 | cacactgatgccacccaga | 2105 | tctgggtggcatcagtgtg | 3004 |
| cgggacgcggaccgggccg | 238 | cggcccggtccgcgtcccg | 1172 | acactgatgccacccagag | 2106 | ctctgggtggcatcagtgt | 3005 |
| gggacgcggaccgggccgg | 239 | ccggcccggtccgcgtccc | 1173 | cactgatgccacccagagg | 2107 | cctctgggtggcatcagtg | 3006 |
| ggacgcggaccgggccggg | 240 | cccggcccggtccgcgtcc | 1174 | actgatgccacccagagga | 2108 | tcctctgggtggcatcagt | 3007 |
| gacgcggaccgggccgggg | 241 | ccccggcccggtccgcgtc | 1175 | ctgatgccacccagaggat | 2109 | atcctctgggtggcatcag | 3008 |
| acgcggaccgggccggggc | 242 | gccccggcccggtccgcgt | 1176 | tgatgccacccagaggatg | 2110 | catcctctgggtggcatca | 3009 |
| cgcggaccgggccggggcg | 243 | cgccccggcccggtccgcg | 1177 | gatgccacccagaggatgt | 2111 | acatcctctgggtggcatc | 3010 |
| gcggaccgggccggggcgc | 244 | gcgccccggcccggtccgc | 1178 | atgccacccagaggatgtt | 2112 | aacatcctctgggtggcat | 3011 |
| cggaccgggccggggcgcc | 245 | ggcgccccggcccggtccg | 1179 | tgccacccagaggatgttc | 2113 | gaacatcctctgggtggca | 3012 |
| ggaccgggccggggcgccc | 246 | gggcgccccggcccggtcc | 1180 | gccacccagaggatgttct | 2114 | agaacatcctctgggtggc | 3013 |
| gaccgggccggggcgccca | 247 | tgggcgccccggcccggtc | 1181 | ccacccagaggatgttcta | 2115 | tagaacatcctctgggtgg | 3014 |
| accgggccggggcgcccac | 248 | gtgggcgccccggcccggt | 1182 | cacccagaggatgttctac | 2116 | gtagaacatcctctgggtg | 3015 |
| ccgggccggggcgcccaca | 249 | tgtgggcgccccggcccgg | 1183 | acccagaggatgttctacc | 2117 | ggtagaacatcctctgggt | 3016 |
| cgggccggggcgcccacag | 250 | ctgtgggcgccccggcccg | 1184 | cccagaggatgttctaccg | 2118 | cggtagaacatcctctggg | 3017 |
| gggccggggcgcccacagc | 251 | gctgtgggcgccccggccc | 1185 | ccagaggatgttctaccgg | 2119 | ccggtagaacatcctctgg | 3018 |
| ggccggggcgcccacagcc | 252 | ggctgtgggcgccccggcc | 1186 | cagaggatgttctaccggc | 2120 | gccggtagaacatcctctg | 3019 |
| gccggggcgcccacagccg | 253 | cggctgtgggcgccccggc | 1187 | agaggatgttctaccggcc | 2121 | ggccggtagaacatcctct | 3020 |
| ccggggcgcccacagccgc | 254 | gcggctgtgggcgccccgg | 1188 | gaggatgttctaccggccc | 2122 | gggccggtagaacatcctc | 3021 |
| cggggcgcccacagccgcc | 255 | ggcggctgtgggcgccccg | 1189 | aggatgttctaccggccct | 2123 | agggccggtagaacatcct | 3022 |
| ggggcgcccacagccgccc | 256 | gggcggctgtgggcgcccc | 1190 | ggatgttctaccggccctc | 2124 | gagggccggtagaacatcc | 3023 |
| gggcgcccacagccgcccg | 257 | cgggcggctgtgggcgccc | 1191 | gatgttctaccggccctcc | 2125 | ggagggccggtagaacatc | 3024 |
| ggcgcccacagccgcccga | 258 | tcgggcggctgtgggcgcc | 1192 | atgttctaccggccctcca | 2126 | tggagggccggtagaacat | 3025 |
| gcgcccacagccgcccgac | 259 | gtcgggcggctgtgggcgc | 1193 | tgttctaccggccctccag | 2127 | ctggagggccggtagaaca | 3026 |
| cgcccacagccgcccgacg | 260 | cgtcgggcggctgtgggcg | 1194 | gttctaccggccctccagt | 2128 | actggagggccggtagaac | 3027 |
| gcccacagccgcccgacgg | 261 | ccgtcgggcggctgtgggc | 1195 | ttctaccggccctccagtt | 2129 | aactggagggccggtagaa | 3028 |
| cccacagccgcccgacggc | 262 | gccgtcgggcggctgtggg | 1196 | tctaccggccctccagtta | 2130 | taactggagggccggtaga | 3029 |
| ccacagccgcccgacggcg | 263 | cgccgtcgggcggctgtgg | 1197 | ctaccggccctccagttac | 2131 | gtaactggagggccggtag | 3030 |
| cacagccgcccgacggcgc | 264 | gcgccgtcgggcggctgtg | 1198 | taccggccctccagttacc | 2132 | ggtaactggagggccggta | 3031 |
| acagccgcccgacggcgcc | 265 | ggcgccgtcgggcggctgt | 1199 | accggccctccagttacca | 2133 | tggtaactggagggccggt | 3032 |
| cagccgcccgacggcgccc | 266 | gggcgccgtcgggcggctg | 1200 | ccggccctccagttaccag | 2134 | ctggtaactggagggccgg | 3033 |
| agccgcccgacggcgccca | 267 | tgggcgccgtcgggcggct | 1201 | cggccctccagttaccagc | 2135 | gctggtaactggagggccg | 3034 |
| gccgcccgacggcgcccag | 268 | ctgggcgccgtcgggcggc | 1202 | ggccctccagttaccagcc | 2136 | ggctggtaactggagggcc | 3035 |
| ccgcccgacggcgcccaga | 269 | tctgggcgccgtcgggcgg | 1203 | gccctccagttaccagccc | 2137 | gggctggtaactggagggc | 3036 |
| cgcccgacggcgcccagag | 270 | ctctgggcgccgtcgggcg | 1204 | ccctccagttaccagcccc | 2138 | ggggctggtaactggaggg | 3037 |
| gcccgacggcgcccagaga | 271 | tctctgggcgccgtcgggc | 1205 | cctccagttaccagccccc | 2139 | gggggctggtaactggagg | 3038 |
| cccgacggcgcccagagag | 272 | ctctctgggcgccgtcggg | 1206 | ctccagttaccagccccct | 2140 | agggggctggtaactggag | 3039 |
| ccgacggcgcccagagagc | 273 | gctctctgggcgccgtcgg | 1207 | tccagttaccagccccctc | 2141 | gagggggctggtaactgga | 3040 |
| cgacggcgcccagagagcg | 274 | cgctctctgggcgccgtcg | 1208 | ccagttaccagccccctct | 2142 | agagggggctggtaactgg | 3041 |
| gacggcgcccagagagcgc | 275 | gcgctctctgggcgccgtc | 1209 | cagttaccagccccctctg | 2143 | cagagggggctggtaactg | 3042 |
| acggcgcccagagagcgcg | 276 | cgcgctctctgggcgccgt | 1210 | agttaccagccccctctgc | 2144 | gcagagggggctggtaact | 3043 |
| cggcgcccagagagcgcgc | 277 | gcgcgctctctgggcgccg | 1211 | gttaccagccccctctgca | 2145 | tgcagagggggctggtaac | 3044 |
| ggcgcccagagagcgcgcg | 278 | cgcgcgctctctgggcgcc | 1212 | ttaccagccccctctgcag | 2146 | ctgcagagggggctggtaa | 3045 |
| gcgcccagagagcgcgcgc | 279 | gcgcgcgctctctgggcgc | 1213 | taccagccccctctgcaga | 2147 | tctgcagagggggctggta | 3046 |
| cgcccagagagcgcgcgcc | 280 | ggcgcgcgctctctgggcg | 1214 | accagccccctctgcagaa | 2148 | ttctgcagagggggctggt | 3047 |
| gcccagagagcgcgcgccc | 281 | gggcgcgcgctctctgggc | 1215 | ccagccccctctgcagaat | 2149 | attctgcagagggggctgg | 3048 |
| cccagagagcgcgcgcccc | 282 | ggggcgcgcgctctctggg | 1216 | cagccccctctgcagaatg | 2150 | cattctgcagagggggctg | 3049 |
| ccagagagcgcgcgccccg | 283 | cggggcgcgcgctctctgg | 1217 | agccccctctgcagaatgc | 2151 | gcattctgcagagggggct | 3050 |
| cagagagcgcgcgccccgc | 284 | gcggggcgcgcgctctctg | 1218 | gccccctctgcagaatgcc | 2152 | ggcattctgcagagggggc | 3051 |
| agagagcgcgcgccccgca | 285 | tgcggggcgcgcgctctct | 1219 | ccccctctgcagaatgcca | 2153 | tggcattctgcagaggggg | 3052 |
| gagagcgcgcgccccgcag | 286 | ctgcggggcgcgcgctctc | 1220 | cccctctgcagaatgccaa | 2154 | ttggcattctgcagagggg | 3053 |
| agagcgcgcgccccgcagc | 287 | gctgcggggcgcgcgctct | 1221 | ccctctgcagaatgccaag | 2155 | cttggcattctgcagaggg | 3054 |
| gagcgcgcgccccgcagcc | 288 | ggctgcggggcgcgcgctc | 1222 | cctctgcagaatgccaaga | 2156 | tcttggcattctgcagagg | 3055 |
| agcgcgcgccccgcagccc | 289 | gggctgcggggcgcgcgct | 1223 | ctctgcagaatgccaagaa | 2157 | ttcttggcattctgcagag | 3056 |
| gcgcgcgccccgcagcccc | 290 | ggggctgcggggcgcgcgc | 1224 | tctgcagaatgccaagaac | 2158 | gttcttggcattctgcaga | 3057 |
| cgcgcgccccgcagccccg | 291 | cggggctgcggggcgcgcg | 1225 | ctgcagaatgccaagaacc | 2159 | ggttcttggcattctgcag | 3058 |
| gcgcgccccgcagccccgc | 292 | gcggggctgcggggcgcgc | 1226 | tgcagaatgccaagaacca | 2160 | tggttcttggcattctgca | 3059 |
| cgcgccccgcagccccgcg | 293 | cgcggggctgcggggcgcg | 1227 | gcagaatgccaagaaccac | 2161 | gtggttcttggcattctgc | 3060 |
| gcgccccgcagccccgcgc | 294 | gcgcggggctgcggggcgc | 1228 | cagaatgccaagaaccacg | 2162 | cgtggttcttggcattctg | 3061 |
| cgccccgcagccccgcgcc | 295 | ggcgcggggctgcggggcg | 1229 | agaatgccaagaaccacga | 2163 | tcgtggttcttggcattct | 3062 |
| gccccgcagccccgcgcct | 296 | aggcgcggggctgcggggc | 1230 | gaatgccaagaaccacgac | 2164 | gtcgtggttcttggcattc | 3063 |
| ccccgcagccccgcgccta | 297 | taggcgcggggctgcgggg | 1231 | aatgccaagaaccacgacc | 2165 | ggtcgtggttcttggcatt | 3064 |
| cccgcagccccgcgcctag | 298 | ctaggcgcggggctgcggg | 1232 | atgccaagaaccacgacca | 2166 | tggtcgtggttcttggcat | 3065 |
| ccgcagccccgcgcctagc | 299 | gctaggcgcggggctgcgg | 1233 | tgccaagaaccacgaccat | 2167 | atggtcgtggttcttggca | 3066 |
| cgcagccccgcgcctagcc | 300 | ggctaggcgcggggctgcg | 1234 | gccaagaaccacgaccatg | 2168 | catggtcgtggttcttggc | 3067 |
| gcagccccgcgcctagccc | 301 | gggctaggcgcggggctgc | 1235 | ccaagaaccacgaccatgc | 2169 | gcatggtcgtggttcttgg | 3068 |
| cagccccgcgcctagcccg | 302 | cgggctaggcgcggggctg | 1236 | caagaaccacgaccatgcc | 2170 | ggcatggtcgtggttcttg | 3069 |
| agccccgcgcctagcccgc | 303 | gcgggctaggcgcggggct | 1237 | aagaaccacgaccatgcct | 2171 | aggcatggtcgtggttctt | 3070 |
| gccccgcgcctagcccgcc | 304 | ggcgggctaggcgcggggc | 1238 | agaaccacgaccatgcctg | 2172 | caggcatggtcgtggttct | 3071 |
| ccccgcgcctagcccgccg | 305 | cggcgggctaggcgcgggg | 1239 | gaaccacgaccatgcctgc | 2173 | gcaggcatggtcgtggttc | 3072 |
| cccgcgcctagcccgccgg | 306 | ccggcgggctaggcgcggg | 1240 | aaccacgaccatgcctgca | 2174 | tgcaggcatggtcgtggtt | 3073 |
| ccgcgcctagcccgccggg | 307 | cccggcgggctaggcgcgg | 1241 | accacgaccatgcctgcat | 2175 | atgcaggcatggtcgtggt | 3074 |
| cgcgcctagcccgccgggc | 308 | gcccggcgggctaggcgcg | 1242 | ccacgaccatgcctgcatc | 2176 | gatgcaggcatggtcgtgg | 3075 |
| gcgcctagcccgccgggca | 309 | tgcccggcgggctaggcgc | 1243 | cacgaccatgcctgcatcg | 2177 | cgatgcaggcatggtcgtg | 3076 |
| cgcctagcccgccgggcat | 310 | atgcccggcgggctaggcg | 1244 | acgaccatgcctgcatcgc | 2178 | gcgatgcaggcatggtcgt | 3077 |
| gcctagcccgccgggcatg | 311 | catgcccggcgggctaggc | 1245 | cgaccatgcctgcatcgcc | 2179 | ggcgatgcaggcatggtcg | 3078 |
| cctagcccgccgggcatgg | 312 | ccatgcccggcgggctagg | 1246 | gaccatgcctgcatcgcct | 2180 | aggcgatgcaggcatggtc | 3079 |
| ctagcccgccgggcatggg | 313 | cccatgcccggcgggctag | 1247 | accatgcctgcatcgcctg | 2181 | caggcgatgcaggcatggt | 3080 |
| tagcccgccgggcatgggg | 314 | ccccatgcccggcgggcta | 1248 | ccatgcctgcatcgcctgt | 2182 | acaggcgatgcaggcatgg | 3081 |
| agcccgccgggcatggggc | 315 | gccccatgcccggcgggct | 1249 | catgcctgcatcgcctgtc | 2183 | gacaggcgatgcaggcatg | 3082 |
| gcccgccgggcatggggcg | 316 | cgccccatgcccggcgggc | 1250 | atgcctgcatcgcctgtcg | 2184 | cgacaggcgatgcaggcat | 3083 |
| cccgccgggcatggggcgc | 317 | gcgccccatgcccggcggg | 1251 | tgcctgcatcgcctgtcgg | 2185 | ccgacaggcgatgcaggca | 3084 |
| ccgccgggcatggggcgcg | 318 | cgcgccccatgcccggcgg | 1252 | gcctgcatcgcctgtcgga | 2186 | tccgacaggcgatgcaggc | 3085 |
| cgccgggcatggggcgcgc | 319 | gcgcgccccatgcccggcg | 1253 | cctgcatcgcctgtcggat | 2187 | atccgacaggcgatgcagg | 3086 |
| gccgggcatggggcgcgcg | 320 | cgcgcgccccatgcccggc | 1254 | ctgcatcgcctgtcggatc | 2188 | gatccgacaggcgatgcag | 3087 |
| ccgggcatggggcgcgcgg | 321 | ccgcgcgccccatgcccgg | 1255 | tgcatcgcctgtcggatca | 2189 | tgatccgacaggcgatgca | 3088 |
| cgggcatggggcgcgcggc | 322 | gccgcgcgccccatgcccg | 1256 | gcatcgcctgtcggatcat | 2190 | atgatccgacaggcgatgc | 3089 |
| gggcatggggcgcgcggca | 323 | tgccgcgcgccccatgccc | 1257 | catcgcctgtcggatcatc | 2191 | gatgatccgacaggcgatg | 3090 |
| ggcatggggcgcgcggcag | 324 | ctgccgcgcgccccatgcc | 1258 | atcgcctgtcggatcatct | 2192 | agatgatccgacaggcgat | 3091 |
| gcatggggcgcgcggcagc | 325 | gctgccgcgcgccccatgc | 1259 | tcgcctgtcggatcatcta | 2193 | tagatgatccgacaggcga | 3092 |
| catggggcgcgcggcagcc | 326 | ggctgccgcgcgccccatg | 1260 | cgcctgtcggatcatctat | 2194 | atagatgatccgacaggcg | 3093 |
| atggggcgcgcggcagccg | 327 | cggctgccgcgcgccccat | 1261 | gcctgtcggatcatctatc | 2195 | gatagatgatccgacaggc | 3094 |
| tggggcgcgcggcagccgc | 328 | gcggctgccgcgcgcccca | 1262 | cctgtcggatcatctatcg | 2196 | cgatagatgatccgacagg | 3095 |
| ggggcgcgcggcagccgcc | 329 | ggcggctgccgcgcgcccc | 1263 | ctgtcggatcatctatcgg | 2197 | ccgatagatgatccgacag | 3096 |
| gggcgcgcggcagccgcct | 330 | aggcggctgccgcgcgccc | 1264 | tgtcggatcatctatcggt | 2198 | accgatagatgatccgaca | 3097 |
| ggcgcgcggcagccgcctg | 331 | caggcggctgccgcgcgcc | 1265 | gtcggatcatctatcggtc | 2199 | gaccgatagatgatccgac | 3098 |
| gcgcgcggcagccgcctga | 332 | tcaggcggctgccgcgcgc | 1266 | tcggatcatctatcggtca | 2200 | tgaccgatagatgatccga | 3099 |
| cgcgcggcagccgcctgaa | 333 | ttcaggcggctgccgcgcg | 1267 | cggatcatctatcggtcag | 2201 | ctgaccgatagatgatccg | 3100 |
| gcgcggcagccgcctgaag | 334 | cttcaggcggctgccgcgc | 1268 | ggatcatctatcggtcaga | 2202 | tctgaccgatagatgatcc | 3101 |
| cgcggcagccgcctgaagc | 335 | gcttcaggcggctgccgcg | 1269 | gatcatctatcggtcagac | 2203 | gtctgaccgatagatgatc | 3102 |
| gcggcagccgcctgaagcc | 336 | ggcttcaggcggctgccgc | 1270 | atcatctatcggtcagacg | 2204 | cgtctgaccgatagatgat | 3103 |
| cggcagccgcctgaagccc | 337 | gggcttcaggcggctgccg | 1271 | tcatctatcggtcagacga | 2205 | tcgtctgaccgatagatga | 3104 |
| ggcagccgcctgaagcccc | 338 | ggggcttcaggcggctgcc | 1272 | catctatcggtcagacgag | 2206 | ctcgtctgaccgatagatg | 3105 |
| gcagccgcctgaagccccg | 339 | cggggcttcaggcggctgc | 1273 | atctatcggtcagacgagc | 2207 | gctcgtctgaccgatagat | 3106 |
| cagccgcctgaagccccgg | 340 | ccggggcttcaggcggctg | 1274 | tctatcggtcagacgagca | 2208 | tgctcgtctgaccgataga | 3107 |
| agccgcctgaagccccggc | 341 | gccggggcttcaggcggct | 1275 | ctatcggtcagacgagcac | 2209 | gtgctcgtctgaccgatag | 3108 |
| gccgcctgaagccccggcc | 342 | ggccggggcttcaggcggc | 1276 | tatcggtcagacgagcacc | 2210 | ggtgctcgtctgaccgata | 3109 |
| ccgcctgaagccccggcct | 343 | aggccggggcttcaggcgg | 1277 | atcggtcagacgagcacca | 2211 | tggtgctcgtctgaccgat | 3110 |
| cgcctgaagccccggcctg | 344 | caggccggggcttcaggcg | 1278 | tcggtcagacgagcaccac | 2212 | gtggtgctcgtctgaccga | 3111 |
| gcctgaagccccggcctgg | 345 | ccaggccggggcttcaggc | 1279 | cggtcagacgagcaccacc | 2213 | ggtggtgctcgtctgaccg | 3112 |
| cctgaagccccggcctggc | 346 | gccaggccggggcttcagg | 1280 | ggtcagacgagcaccaccc | 2214 | gggtggtgctcgtctgacc | 3113 |
| ctgaagccccggcctggcc | 347 | ggccaggccggggcttcag | 1281 | gtcagacgagcaccaccct | 2215 | agggtggtgctcgtctgac | 3114 |
| tgaagccccggcctggccc | 348 | gggccaggccggggcttca | 1282 | tcagacgagcaccaccctc | 2216 | gagggtggtgctcgtctga | 3115 |
| gaagccccggcctggcccg | 349 | cgggccaggccggggcttc | 1283 | cagacgagcaccaccctcc | 2217 | ggagggtggtgctcgtctg | 3116 |
| aagccccggcctggcccgg | 350 | ccgggccaggccggggctt | 1284 | agacgagcaccaccctccc | 2218 | gggagggtggtgctcgtct | 3117 |
| agccccggcctggcccggc | 351 | gccgggccaggccggggct | 1285 | gacgagcaccaccctccca | 2219 | tgggagggtggtgctcgtc | 3118 |
| gccccggcctggcccggcc | 352 | ggccgggccaggccggggc | 1286 | acgagcaccaccctcccat | 2220 | atgggagggtggtgctcgt | 3119 |
| ccccggcctggcccggccg | 353 | cggccgggccaggccgggg | 1287 | cgagcaccaccctcccatc | 2221 | gatgggagggtggtgctcg | 3120 |
| cccggcctggcccggccgc | 354 | gcggccgggccaggccggg | 1288 | gagcaccaccctcccatcc | 2222 | ggatgggagggtggtgctc | 3121 |
| ccggcctggcccggccgca | 355 | tgcggccgggccaggccgg | 1289 | agcaccaccctcccatcct | 2223 | aggatgggagggtggtgct | 3122 |
| cggcctggcccggccgcac | 356 | gtgcggccgggccaggccg | 1290 | gcaccaccctcccatcctg | 2224 | caggatgggagggtggtgc | 3123 |
| ggcctggcccggccgcacc | 357 | ggtgcggccgggccaggcc | 1291 | caccaccctcccatcctgc | 2225 | gcaggatgggagggtggtg | 3124 |
| gcctggcccggccgcaccc | 358 | gggtgcggccgggccaggc | 1292 | accaccctcccatcctgcc | 2226 | ggcaggatgggagggtggt | 3125 |
| cctggcccggccgcacccg | 359 | cgggtgcggccgggccagg | 1293 | ccaccctcccatcctgccc | 2227 | gggcaggatgggagggtgg | 3126 |
| ctggcccggccgcacccgg | 360 | ccgggtgcggccgggccag | 1294 | caccctcccatcctgcccc | 2228 | ggggcaggatgggagggtg | 3127 |
| tggcccggccgcacccggc | 361 | gccgggtgcggccgggcca | 1295 | accctcccatcctgccccc | 2229 | gggggcaggatgggagggt | 3128 |
| ggcccggccgcacccggcc | 362 | ggccgggtgcggccgggcc | 1296 | ccctcccatcctgccccca | 2230 | tgggggcaggatgggaggg | 3129 |
| gcccggccgcacccggccg | 363 | cggccgggtgcggccgggc | 1297 | cctcccatcctgcccccaa | 2231 | ttgggggcaggatgggagg | 3130 |
| cccggccgcacccggccgg | 364 | ccggccgggtgcggccggg | 1298 | ctcccatcctgcccccaaa | 2232 | tttgggggcaggatgggag | 3131 |
| ccggccgcacccggccgga | 365 | tccggccgggtgcggccgg | 1299 | tcccatcctgcccccaaag | 2233 | ctttgggggcaggatggga | 3132 |
| cggccgcacccggccggag | 366 | ctccggccgggtgcggccg | 1300 | cccatcctgcccccaaagg | 2234 | cctttgggggcaggatggg | 3133 |
| ggccgcacccggccggagg | 367 | cctccggccgggtgcggcc | 1301 | ccatcctgcccccaaaggc | 2235 | gcctttgggggcaggatgg | 3134 |
| gccgcacccggccggaggc | 368 | gcctccggccgggtgcggc | 1302 | catcctgcccccaaaggca | 2236 | tgcctttgggggcaggatg | 3135 |
| ccgcacccggccggaggcg | 369 | cgcctccggccgggtgcgg | 1303 | atcctgcccccaaaggcag | 2237 | ctgcctttgggggcaggat | 3136 |
| cgcacccggccggaggcgg | 370 | ccgcctccggccgggtgcg | 1304 | tcctgcccccaaaggcaga | 2238 | tctgcctttgggggcagga | 3137 |
| gcacccggccggaggcgga | 371 | tccgcctccggccgggtgc | 1305 | cctgcccccaaaggcagac | 2239 | gtctgcctttgggggcagg | 3138 |
| cacccggccggaggcggag | 372 | ctccgcctccggccgggtg | 1306 | ctgcccccaaaggcagacc | 2240 | ggtctgcctttgggggcag | 3139 |
| acccggccggaggcggagg | 373 | cctccgcctccggccgggt | 1307 | tgcccccaaaggcagacct | 2241 | aggtctgcctttgggggca | 3140 |
| cccggccggaggcggaggg | 374 | ccctccgcctccggccggg | 1308 | gcccccaaaggcagacctg | 2242 | caggtctgcctttgggggc | 3141 |
| ccggccggaggcggagggc | 375 | gccctccgcctccggccgg | 1309 | cccccaaaggcagacctga | 2243 | tcaggtctgcctttggggg | 3142 |
| cggccggaggcggagggca | 376 | tgccctccgcctccggccg | 1310 | ccccaaaggcagacctgac | 2244 | gtcaggtctgcctttgggg | 3143 |
| ggccggaggcggagggcag | 377 | ctgccctccgcctccggcc | 1311 | cccaaaggcagacctgacc | 2245 | ggtcaggtctgcctttggg | 3144 |
| gccggaggcggagggcaga | 378 | tctgccctccgcctccggc | 1312 | ccaaaggcagacctgacca | 2246 | tggtcaggtctgcctttgg | 3145 |
| ccggaggcggagggcagag | 379 | ctctgccctccgcctccgg | 1313 | caaaggcagacctgaccat | 2247 | atggtcaggtctgcctttg | 3146 |
| cggaggcggagggcagagc | 380 | gctctgccctccgcctccg | 1314 | aaaggcagacctgaccatc | 2248 | gatggtcaggtctgccttt | 3147 |
| ggaggcggagggcagagcg | 381 | cgctctgccctccgcctcc | 1315 | aaggcagacctgaccatcg | 2249 | cgatggtcaggtctgcctt | 3148 |
| gaggcggagggcagagcgc | 382 | gcgctctgccctccgcctc | 1316 | aggcagacctgaccatcgg | 2250 | ccgatggtcaggtctgcct | 3149 |
| aggcggagggcagagcgcg | 383 | cgcgctctgccctccgcct | 1317 | ggcagacctgaccatcggc | 2251 | gccgatggtcaggtctgcc | 3150 |
| ggcggagggcagagcgcgc | 384 | gcgcgctctgccctccgcc | 1318 | gcagacctgaccatcggcc | 2252 | ggccgatggtcaggtctgc | 3151 |
| gcggagggcagagcgcgcg | 385 | cgcgcgctctgccctccgc | 1319 | cagacctgaccatcggcct | 2253 | aggccgatggtcaggtctg | 3152 |
| cggagggcagagcgcgcgc | 386 | gcgcgcgctctgccctccg | 1320 | agacctgaccatcggcctg | 2254 | caggccgatggtcaggtct | 3153 |
| ggagggcagagcgcgcgcc | 387 | ggcgcgcgctctgccctcc | 1321 | gacctgaccatcggcctgc | 2255 | gcaggccgatggtcaggtc | 3154 |
| gagggcagagcgcgcgccc | 388 | gggcgcgcgctctgccctc | 1322 | acctgaccatcggcctgca | 2256 | tgcaggccgatggtcaggt | 3155 |
| agggcagagcgcgcgccca | 389 | tgggcgcgcgctctgccct | 1323 | cctgaccatcggcctgcac | 2257 | gtgcaggccgatggtcagg | 3156 |
| gggcagagcgcgcgcccag | 390 | ctgggcgcgcgctctgccc | 1324 | ctgaccatcggcctgcacg | 2258 | cgtgcaggccgatggtcag | 3157 |
| ggcagagcgcgcgcccagt | 391 | actgggcgcgcgctctgcc | 1325 | tgaccatcggcctgcacgg | 2259 | ccgtgcaggccgatggtca | 3158 |
| gcagagcgcgcgcccagtt | 392 | aactgggcgcgcgctctgc | 1326 | gaccatcggcctgcacggg | 2260 | cccgtgcaggccgatggtc | 3159 |
| cagagcgcgcgcccagttg | 393 | caactgggcgcgcgctctg | 1327 | accatcggcctgcacgggg | 2261 | ccccgtgcaggccgatggt | 3160 |
| agagcgcgcgcccagttgc | 394 | gcaactgggcgcgcgctct | 1328 | ccatcggcctgcacgggga | 2262 | tccccgtgcaggccgatgg | 3161 |
| gagcgcgcgcccagttgcc | 395 | ggcaactgggcgcgcgctc | 1329 | catcggcctgcacggggag | 2263 | ctccccgtgcaggccgatg | 3162 |
| agcgcgcgcccagttgccc | 396 | gggcaactgggcgcgcgct | 1330 | atcggcctgcacggggagt | 2264 | actccccgtgcaggccgat | 3163 |
| gcgcgcgcccagttgcccg | 397 | cgggcaactgggcgcgcgc | 1331 | tcggcctgcacggggagtg | 2265 | cactccccgtgcaggccga | 3164 |
| cgcgcgcccagttgcccgg | 398 | ccgggcaactgggcgcgcg | 1332 | cggcctgcacggggagtgg | 2266 | ccactccccgtgcaggccg | 3165 |
| gcgcgcccagttgcccggg | 399 | cccgggcaactgggcgcgc | 1333 | ggcctgcacggggagtggg | 2267 | cccactccccgtgcaggcc | 3166 |
| cgcgcccagttgcccgggc | 400 | gcccgggcaactgggcgcg | 1334 | gcctgcacggggagtgggt | 2268 | acccactccccgtgcaggc | 3167 |
| gcgcccagttgcccgggca | 401 | tgcccgggcaactgggcgc | 1335 | cctgcacggggagtgggtg | 2269 | cacccactccccgtgcagg | 3168 |
| cgcccagttgcccgggcac | 402 | gtgcccgggcaactgggcg | 1336 | ctgcacggggagtgggtga | 2270 | tcacccactccccgtgcag | 3169 |
| gcccagttgcccgggcacc | 403 | ggtgcccgggcaactgggc | 1337 | tgcacggggagtgggtgag | 2271 | ctcacccactccccgtgca | 3170 |
| cccagttgcccgggcacca | 404 | tggtgcccgggcaactggg | 1338 | gcacggggagtgggtgagc | 2272 | gctcacccactccccgtgc | 3171 |
| ccagttgcccgggcaccaa | 405 | ttggtgcccgggcaactgg | 1339 | cacggggagtgggtgagcc | 2273 | ggctcacccactccccgtg | 3172 |
| cagttgcccgggcaccaaa | 406 | tttggtgcccgggcaactg | 1340 | acggggagtgggtgagcca | 2274 | tggctcacccactccccgt | 3173 |
| agttgcccgggcaccaaat | 407 | atttggtgcccgggcaact | 1341 | cggggagtgggtgagccag | 2275 | ctggctcacccactccccg | 3174 |
| gttgcccgggcaccaaatc | 408 | gatttggtgcccgggcaac | 1342 | ggggagtgggtgagccagc | 2276 | gctggctcacccactcccc | 3175 |
| ttgcccgggcaccaaatcg | 409 | cgatttggtgcccgggcaa | 1343 | gggagtgggtgagccagcg | 2277 | cgctggctcacccactccc | 3176 |
| tgcccgggcaccaaatcgg | 410 | ccgatttggtgcccgggca | 1344 | ggagtgggtgagccagcgc | 2278 | gcgctggctcacccactcc | 3177 |
| gcccgggcaccaaatcgga | 411 | tccgatttggtgcccgggc | 1345 | gagtgggtgagccagcgct | 2279 | agcgctggctcacccactc | 3178 |
| cccgggcaccaaatcggag | 412 | ctccgatttggtgcccggg | 1346 | agtgggtgagccagcgctg | 2280 | cagcgctggctcacccact | 3179 |
| ccgggcaccaaatcggagc | 413 | gctccgatttggtgcccgg | 1347 | gtgggtgagccagcgctgt | 2281 | acagcgctggctcacccac | 3180 |
| cgggcaccaaatcggagcg | 414 | cgctccgatttggtgcccg | 1348 | tgggtgagccagcgctgtg | 2282 | cacagcgctggctcaccca | 3181 |
| gggcaccaaatcggagcgc | 415 | gcgctccgatttggtgccc | 1349 | gggtgagccagcgctgtga | 2283 | tcacagcgctggctcaccc | 3182 |
| ggcaccaaatcggagcgcg | 416 | cgcgctccgatttggtgcc | 1350 | ggtgagccagcgctgtgag | 2284 | ctcacagcgctggctcacc | 3183 |
| gcaccaaatcggagcgcgg | 417 | ccgcgctccgatttggtgc | 1351 | gtgagccagcgctgtgagg | 2285 | cctcacagcgctggctcac | 3184 |
| caccaaatcggagcgcggc | 418 | gccgcgctccgatttggtg | 1352 | tgagccagcgctgtgaggt | 2286 | acctcacagcgctggctca | 3185 |
| accaaatcggagcgcggcg | 419 | cgccgcgctccgatttggt | 1353 | gagccagcgctgtgaggtg | 2287 | cacctcacagcgctggctc | 3186 |
| ccaaatcggagcgcggcgt | 420 | acgccgcgctccgatttgg | 1354 | agccagcgctgtgaggtgc | 2288 | gcacctcacagcgctggct | 3187 |
| caaatcggagcgcggcgtg | 421 | cacgccgcgctccgatttg | 1355 | gccagcgctgtgaggtgcg | 2289 | cgcacctcacagcgctggc | 3188 |
| aaatcggagcgcggcgtgc | 422 | gcacgccgcgctccgattt | 1356 | ccagcgctgtgaggtgcgc | 2290 | gcgcacctcacagcgctgg | 3189 |
| aatcggagcgcggcgtgcg | 423 | cgcacgccgcgctccgatt | 1357 | cagcgctgtgaggtgcgcc | 2291 | ggcgcacctcacagcgctg | 3190 |
| atcggagcgcggcgtgcgg | 424 | ccgcacgccgcgctccgat | 1358 | agcgctgtgaggtgcgccc | 2292 | gggcgcacctcacagcgct | 3191 |
| tcggagcgcggcgtgcggg | 425 | cccgcacgccgcgctccga | 1359 | gcgctgtgaggtgcgcccc | 2293 | ggggcgcacctcacagcgc | 3192 |
| cggagcgcggcgtgcggga | 426 | tcccgcacgccgcgctccg | 1360 | cgctgtgaggtgcgccccg | 2294 | cggggcgcacctcacagcg | 3193 |
| ggagcgcggcgtgcgggag | 427 | ctcccgcacgccgcgctcc | 1361 | gctgtgaggtgcgccccga | 2295 | tcggggcgcacctcacagc | 3194 |
| gagcgcggcgtgcgggagg | 428 | cctcccgcacgccgcgctc | 1362 | ctgtgaggtgcgccccgaa | 2296 | ttcggggcgcacctcacag | 3195 |
| agcgcggcgtgcgggaggc | 429 | gcctcccgcacgccgcgct | 1363 | tgtgaggtgcgccccgaag | 2297 | cttcggggcgcacctcaca | 3196 |
| gcgcggcgtgcgggaggcc | 430 | ggcctcccgcacgccgcgc | 1364 | gtgaggtgcgccccgaagt | 2298 | acttcggggcgcacctcac | 3197 |
| cgcggcgtgcgggaggccc | 431 | gggcctcccgcacgccgcg | 1365 | tgaggtgcgccccgaagtc | 2299 | gacttcggggcgcacctca | 3198 |
| gcggcgtgcgggaggcccc | 432 | ggggcctcccgcacgccgc | 1366 | gaggtgcgccccgaagtcc | 2300 | ggacttcggggcgcacctc | 3199 |
| cggcgtgcgggaggcccca | 433 | tggggcctcccgcacgccg | 1367 | aggtgcgccccgaagtcct | 2301 | aggacttcggggcgcacct | 3200 |
| ggcgtgcgggaggccccag | 434 | ctggggcctcccgcacgcc | 1368 | ggtgcgccccgaagtcctc | 2302 | gaggacttcggggcgcacc | 3201 |
| gcgtgcgggaggccccaga | 435 | tctggggcctcccgcacgc | 1369 | gtgcgccccgaagtcctct | 2303 | agaggacttcggggcgcac | 3202 |
| cgtgcgggaggccccagag | 436 | ctctggggcctcccgcacg | 1370 | tgcgccccgaagtcctctt | 2304 | aagaggacttcggggcgca | 3203 |
| gtgcgggaggccccagagc | 437 | gctctggggcctcccgcac | 1371 | gcgccccgaagtcctcttc | 2305 | gaagaggacttcggggcgc | 3204 |
| tgcgggaggccccagagca | 438 | tgctctggggcctcccgca | 1372 | cgccccgaagtcctcttcc | 2306 | ggaagaggacttcggggcg | 3205 |
| gcgggaggccccagagcag | 439 | ctgctctggggcctcccgc | 1373 | gccccgaagtcctcttcct | 2307 | aggaagaggacttcggggc | 3206 |
| cgggaggccccagagcagg | 440 | cctgctctggggcctcccg | 1374 | ccccgaagtcctcttcctc | 2308 | gaggaagaggacttcgggg | 3207 |
| gggaggccccagagcagga | 441 | tcctgctctggggcctccc | 1375 | cccgaagtcctcttcctca | 2309 | tgaggaagaggacttcggg | 3208 |
| ggaggccccagagcaggac | 442 | gtcctgctctggggcctcc | 1376 | ccgaagtcctcttcctcac | 2310 | gtgaggaagaggacttcgg | 3209 |
| gaggccccagagcaggact | 443 | agtcctgctctggggcctc | 1377 | cgaagtcctcttcctcacc | 2311 | ggtgaggaagaggacttcg | 3210 |
| aggccccagagcaggactg | 444 | cagtcctgctctggggcct | 1378 | gaagtcctcttcctcaccc | 2312 | gggtgaggaagaggacttc | 3211 |
| ggccccagagcaggactgg | 445 | ccagtcctgctctggggcc | 1379 | aagtcctcttcctcacccg | 2313 | cgggtgaggaagaggactt | 3212 |
| gccccagagcaggactgga | 446 | tccagtcctgctctggggc | 1380 | agtcctcttcctcacccgc | 2314 | gcgggtgaggaagaggact | 3213 |
| ccccagagcaggactggaa | 447 | ttccagtcctgctctgggg | 1381 | gtcctcttcctcacccgcc | 2315 | ggcgggtgaggaagaggac | 3214 |
| cccagagcaggactggaaa | 448 | tttccagtcctgctctggg | 1382 | tcctcttcctcacccgcca | 2316 | tggcgggtgaggaagagga | 3215 |
| ccagagcaggactggaaat | 449 | atttccagtcctgctctgg | 1383 | cctcttcctcacccgccac | 2317 | gtggcgggtgaggaagagg | 3216 |
| cagagcaggactggaaatg | 450 | catttccagtcctgctctg | 1384 | ctcttcctcacccgccact | 2318 | agtggcgggtgaggaagag | 3217 |
| agagcaggactggaaatgt | 451 | acatttccagtcctgctct | 1385 | tcttcctcacccgccactt | 2319 | aagtggcgggtgaggaaga | 3218 |
| gagcaggactggaaatgtc | 452 | gacatttccagtcctgctc | 1386 | cttcctcacccgccacttc | 2320 | gaagtggcgggtgaggaag | 3219 |
| agcaggactggaaatgtcc | 453 | ggacatttccagtcctgct | 1387 | ttcctcacccgccacttca | 2321 | tgaagtggcgggtgaggaa | 3220 |
| gcaggactggaaatgtcct | 454 | aggacatttccagtcctgc | 1388 | tcctcacccgccacttcat | 2322 | atgaagtggcgggtgagga | 3221 |
| caggactggaaatgtcctg | 455 | caggacatttccagtcctg | 1389 | cctcacccgccacttcatc | 2323 | gatgaagtggcgggtgagg | 3222 |
| aggactggaaatgtcctgg | 456 | ccaggacatttccagtcct | 1390 | ctcacccgccacttcatct | 2324 | agatgaagtggcgggtgag | 3223 |
| ggactggaaatgtcctggc | 457 | gccaggacatttccagtcc | 1391 | tcacccgccacttcatctt | 2325 | aagatgaagtggcgggtga | 3224 |
| gactggaaatgtcctggcc | 458 | ggccaggacatttccagtc | 1392 | cacccgccacttcatcttc | 2326 | gaagatgaagtggcgggtg | 3225 |
| actggaaatgtcctggccg | 459 | cggccaggacatttccagt | 1393 | acccgccacttcatcttcc | 2327 | ggaagatgaagtggcgggt | 3226 |
| ctggaaatgtcctggccgc | 460 | gcggccaggacatttccag | 1394 | cccgccacttcatcttcca | 2328 | tggaagatgaagtggcggg | 3227 |
| tggaaatgtcctggccgcg | 461 | cgcggccaggacatttcca | 1395 | ccgccacttcatcttccat | 2329 | atggaagatgaagtggcgg | 3228 |
| ggaaatgtcctggccgcgc | 462 | gcgcggccaggacatttcc | 1396 | cgccacttcatcttccatg | 2330 | catggaagatgaagtggcg | 3229 |
| gaaatgtcctggccgcgcc | 463 | ggcgcggccaggacatttc | 1397 | gccacttcatcttccatga | 2331 | tcatggaagatgaagtggc | 3230 |
| aaatgtcctggccgcgccg | 464 | cggcgcggccaggacattt | 1398 | ccacttcatcttccatgac | 2332 | gtcatggaagatgaagtgg | 3231 |
| aatgtcctggccgcgccgc | 465 | gcggcgcggccaggacatt | 1399 | cacttcatcttccatgaca | 2333 | tgtcatggaagatgaagtg | 3232 |
| atgtcctggccgcgccgcc | 466 | ggcggcgcggccaggacat | 1400 | acttcatcttccatgacaa | 2334 | ttgtcatggaagatgaagt | 3233 |
| tgtcctggccgcgccgcct | 467 | aggcggcgcggccaggaca | 1401 | cttcatcttccatgacaac | 2335 | gttgtcatggaagatgaag | 3234 |
| gtcctggccgcgccgcctc | 468 | gaggcggcgcggccaggac | 1402 | ttcatcttccatgacaaca | 2336 | tgttgtcatggaagatgaa | 3235 |
| tcctggccgcgccgcctcc | 469 | ggaggcggcgcggccagga | 1403 | tcatcttccatgacaacaa | 2337 | ttgttgtcatggaagatga | 3236 |
| cctggccgcgccgcctcct | 470 | aggaggcggcgcggccagg | 1404 | catcttccatgacaacaac | 2338 | gttgttgtcatggaagatg | 3237 |
| ctggccgcgccgcctcctg | 471 | caggaggcggcgcggccag | 1405 | atcttccatgacaacaaca | 2339 | tgttgttgtcatggaagat | 3238 |
| tggccgcgccgcctcctgc | 472 | gcaggaggcggcgcggcca | 1406 | tcttccatgacaacaacaa | 2340 | ttgttgttgtcatggaaga | 3239 |
| ggccgcgccgcctcctgct | 473 | agcaggaggcggcgcggcc | 1407 | cttccatgacaacaacaac | 2341 | gttgttgttgtcatggaag | 3240 |
| gccgcgccgcctcctgctc | 474 | gagcaggaggcggcgcggc | 1408 | ttccatgacaacaacaaca | 2342 | tgttgttgttgtcatggaa | 3241 |
| ccgcgccgcctcctgctca | 475 | tgagcaggaggcggcgcgg | 1409 | tccatgacaacaacaacac | 2343 | gtgttgttgttgtcatgga | 3242 |
| cgcgccgcctcctgctcag | 476 | ctgagcaggaggcggcgcg | 1410 | ccatgacaacaacaacacc | 2344 | ggtgttgttgttgtcatgg | 3243 |
| gcgccgcctcctgctcaga | 477 | tctgagcaggaggcggcgc | 1411 | catgacaacaacaacacct | 2345 | aggtgttgttgttgtcatg | 3244 |
| cgccgcctcctgctcagat | 478 | atctgagcaggaggcggcg | 1412 | atgacaacaacaacacctg | 2346 | caggtgttgttgttgtcat | 3245 |
| gccgcctcctgctcagata | 479 | tatctgagcaggaggcggc | 1413 | tgacaacaacaacacctgg | 2347 | ccaggtgttgttgttgtca | 3246 |
| ccgcctcctgctcagatac | 480 | gtatctgagcaggaggcgg | 1414 | gacaacaacaacacctggg | 2348 | cccaggtgttgttgttgtc | 3247 |
| cgcctcctgctcagatacc | 481 | ggtatctgagcaggaggcg | 1415 | acaacaacaacacctggga | 2349 | tcccaggtgttgttgttgt | 3248 |
| gcctcctgctcagatacct | 482 | aggtatctgagcaggaggc | 1416 | caacaacaacacctgggag | 2350 | ctcccaggtgttgttgttg | 3249 |
| cctcctgctcagatacctg | 483 | caggtatctgagcaggagg | 1417 | aacaacaacacctgggagg | 2351 | cctcccaggtgttgttgtt | 3250 |
| ctcctgctcagatacctgt | 484 | acaggtatctgagcaggag | 1418 | acaacaacacctgggaggg | 2352 | ccctcccaggtgttgttgt | 3251 |
| tcctgctcagatacctgtt | 485 | aacaggtatctgagcagga | 1419 | caacaacacctgggagggc | 2353 | gccctcccaggtgttgttg | 3252 |
| cctgctcagatacctgttc | 486 | gaacaggtatctgagcagg | 1420 | aacaacacctgggagggcc | 2354 | ggccctcccaggtgttgtt | 3253 |
| ctgctcagatacctgttcc | 487 | ggaacaggtatctgagcag | 1421 | acaacacctgggagggcca | 2355 | tggccctcccaggtgttgt | 3254 |
| tgctcagatacctgttccc | 488 | gggaacaggtatctgagca | 1422 | caacacctgggagggccac | 2356 | gtggccctcccaggtgttg | 3255 |
| gctcagatacctgttcccg | 489 | cgggaacaggtatctgagc | 1423 | aacacctgggagggccact | 2357 | agtggccctcccaggtgtt | 3256 |
| ctcagatacctgttcccgg | 490 | ccgggaacaggtatctgag | 1424 | acacctgggagggccacta | 2358 | tagtggccctcccaggtgt | 3257 |
| tcagatacctgttcccggc | 491 | gccgggaacaggtatctga | 1425 | cacctgggagggccactac | 2359 | gtagtggccctcccaggtg | 3258 |
| cagatacctgttcccggcc | 492 | ggccgggaacaggtatctg | 1426 | acctgggagggccactact | 2360 | agtagtggccctcccaggt | 3259 |
| agatacctgttcccggccc | 493 | gggccgggaacaggtatct | 1427 | cctgggagggccactacta | 2361 | tagtagtggccctcccagg | 3260 |
| gatacctgttcccggccct | 494 | agggccgggaacaggtatc | 1428 | ctgggagggccactactac | 2362 | gtagtagtggccctcccag | 3261 |
| atacctgttcccggccctc | 495 | gagggccgggaacaggtat | 1429 | tgggagggccactactacc | 2363 | ggtagtagtggccctccca | 3262 |
| tacctgttcccggccctcc | 496 | ggagggccgggaacaggta | 1430 | gggagggccactactacca | 2364 | tggtagtagtggccctccc | 3263 |
| acctgttcccggccctcct | 497 | aggagggccgggaacaggt | 1431 | ggagggccactactaccac | 2365 | gtggtagtagtggccctcc | 3264 |
| cctgttcccggccctcctg | 498 | caggagggccgggaacagg | 1432 | gagggccactactaccact | 2366 | agtggtagtagtggccctc | 3265 |
| ctgttcccggccctcctgc | 499 | gcaggagggccgggaacag | 1433 | agggccactactaccacta | 2367 | tagtggtagtagtggccct | 3266 |
| tgttcccggccctcctgct | 500 | agcaggagggccgggaaca | 1434 | gggccactactaccactac | 2368 | gtagtggtagtagtggccc | 3267 |
| gttcccggccctcctgctt | 501 | aagcaggagggccgggaac | 1435 | ggccactactaccactact | 2369 | agtagtggtagtagtggcc | 3268 |
| ttcccggccctcctgcttc | 502 | gaagcaggagggccgggaa | 1436 | gccactactaccactactc | 2370 | gagtagtggtagtagtggc | 3269 |
| tcccggccctcctgcttca | 503 | tgaagcaggagggccggga | 1437 | ccactactaccactactca | 2371 | tgagtagtggtagtagtgg | 3270 |
| cccggccctcctgcttcac | 504 | gtgaagcaggagggccggg | 1438 | cactactaccactactcag | 2372 | ctgagtagtggtagtagtg | 3271 |
| ccggccctcctgcttcacg | 505 | cgtgaagcaggagggccgg | 1439 | actactaccactactcaga | 2373 | tctgagtagtggtagtagt | 3272 |
| cggccctcctgcttcacgg | 506 | ccgtgaagcaggagggccg | 1440 | ctactaccactactcagac | 2374 | gtctgagtagtggtagtag | 3273 |
| ggccctcctgcttcacggg | 507 | cccgtgaagcaggagggcc | 1441 | tactaccactactcagacc | 2375 | ggtctgagtagtggtagta | 3274 |
| gccctcctgcttcacgggc | 508 | gcccgtgaagcaggagggc | 1442 | actaccactactcagaccc | 2376 | gggtctgagtagtggtagt | 3275 |
| ccctcctgcttcacgggct | 509 | agcccgtgaagcaggaggg | 1443 | ctaccactactcagacccg | 2377 | cgggtctgagtagtggtag | 3276 |
| cctcctgcttcacgggctg | 510 | cagcccgtgaagcaggagg | 1444 | taccactactcagacccgg | 2378 | ccgggtctgagtagtggta | 3277 |
| ctcctgcttcacgggctgg | 511 | ccagcccgtgaagcaggag | 1445 | accactactcagacccggt | 2379 | accgggtctgagtagtggt | 3278 |
| tcctgcttcacgggctggg | 512 | cccagcccgtgaagcagga | 1446 | ccactactcagacccggtg | 2380 | caccgggtctgagtagtgg | 3279 |
| cctgcttcacgggctggga | 513 | tcccagcccgtgaagcagg | 1447 | cactactcagacccggtgt | 2381 | acaccgggtctgagtagtg | 3280 |
| ctgcttcacgggctgggag | 514 | ctcccagcccgtgaagcag | 1448 | actactcagacccggtgtg | 2382 | cacaccgggtctgagtagt | 3281 |
| tgcttcacgggctgggaga | 515 | tctcccagcccgtgaagca | 1449 | ctactcagacccggtgtgc | 2383 | gcacaccgggtctgagtag | 3282 |
| gcttcacgggctgggagag | 516 | ctctcccagcccgtgaagc | 1450 | tactcagacccggtgtgca | 2384 | tgcacaccgggtctgagta | 3283 |
| cttcacgggctgggagagg | 517 | cctctcccagcccgtgaag | 1451 | actcagacccggtgtgcaa | 2385 | ttgcacaccgggtctgagt | 3284 |
| ttcacgggctgggagaggg | 518 | ccctctcccagcccgtgaa | 1452 | ctcagacccggtgtgcaag | 2386 | cttgcacaccgggtctgag | 3285 |
| tcacgggctgggagagggt | 519 | accctctcccagcccgtga | 1453 | tcagacccggtgtgcaagc | 2387 | gcttgcacaccgggtctga | 3286 |
| cacgggctgggagagggtt | 520 | aaccctctcccagcccgtg | 1454 | cagacccggtgtgcaagca | 2388 | tgcttgcacaccgggtctg | 3287 |
| acgggctgggagagggttc | 521 | gaaccctctcccagcccgt | 1455 | agacccggtgtgcaagcac | 2389 | gtgcttgcacaccgggtct | 3288 |
| cgggctgggagagggttct | 522 | agaaccctctcccagcccg | 1456 | gacccggtgtgcaagcacc | 2390 | ggtgcttgcacaccgggtc | 3289 |
| gggctgggagagggttctg | 523 | cagaaccctctcccagccc | 1457 | acccggtgtgcaagcaccc | 2391 | gggtgcttgcacaccgggt | 3290 |
| ggctgggagagggttctgc | 524 | gcagaaccctctcccagcc | 1458 | cccggtgtgcaagcacccc | 2392 | ggggtgcttgcacaccggg | 3291 |
| gctgggagagggttctgcc | 525 | ggcagaaccctctcccagc | 1459 | ccggtgtgcaagcacccca | 2393 | tggggtgcttgcacaccgg | 3292 |
| ctgggagagggttctgccc | 526 | gggcagaaccctctcccag | 1460 | cggtgtgcaagcaccccac | 2394 | gtggggtgcttgcacaccg | 3293 |
| tgggagagggttctgccct | 527 | agggcagaaccctctccca | 1461 | ggtgtgcaagcaccccacc | 2395 | ggtggggtgcttgcacacc | 3294 |
| gggagagggttctgccctc | 528 | gagggcagaaccctctccc | 1462 | gtgtgcaagcaccccacct | 2396 | aggtggggtgcttgcacac | 3295 |
| ggagagggttctgccctcc | 529 | ggagggcagaaccctctcc | 1463 | tgtgcaagcaccccacctt | 2397 | aaggtggggtgcttgcaca | 3296 |
| gagagggttctgccctcct | 530 | aggagggcagaaccctctc | 1464 | gtgcaagcaccccaccttc | 2398 | gaaggtggggtgcttgcac | 3297 |
| agagggttctgccctcctt | 531 | aaggagggcagaaccctct | 1465 | tgcaagcaccccaccttct | 2399 | agaaggtggggtgcttgca | 3298 |
| gagggttctgccctccttc | 532 | gaaggagggcagaaccctc | 1466 | gcaagcaccccaccttctc | 2400 | gagaaggtggggtgcttgc | 3299 |
| agggttctgccctccttca | 533 | tgaaggagggcagaaccct | 1467 | caagcaccccaccttctcc | 2401 | ggagaaggtggggtgcttg | 3300 |
| gggttctgccctccttcat | 534 | atgaaggagggcagaaccc | 1468 | aagcaccccaccttctcca | 2402 | tggagaaggtggggtgctt | 3301 |
| ggttctgccctccttcatc | 535 | gatgaaggagggcagaacc | 1469 | agcaccccaccttctccat | 2403 | atggagaaggtggggtgct | 3302 |
| gttctgccctccttcatcc | 536 | ggatgaaggagggcagaac | 1470 | gcaccccaccttctccatc | 2404 | gatggagaaggtggggtgc | 3303 |
| ttctgccctccttcatcca | 537 | tggatgaaggagggcagaa | 1471 | caccccaccttctccatct | 2405 | agatggagaaggtggggtg | 3304 |
| tctgccctccttcatccag | 538 | ctggatgaaggagggcaga | 1472 | accccaccttctccatcta | 2406 | tagatggagaaggtggggt | 3305 |
| ctgccctccttcatccaga | 539 | tctggatgaaggagggcag | 1473 | ccccaccttctccatctac | 2407 | gtagatggagaaggtgggg | 3306 |
| tgccctccttcatccagac | 540 | gtctggatgaaggagggca | 1474 | cccaccttctccatctacg | 2408 | cgtagatggagaaggtggg | 3307 |
| gccctccttcatccagaca | 541 | tgtctggatgaaggagggc | 1475 | ccaccttctccatctacgc | 2409 | gcgtagatggagaaggtgg | 3308 |
| ccctccttcatccagacag | 542 | ctgtctggatgaaggaggg | 1476 | caccttctccatctacgcc | 2410 | ggcgtagatggagaaggtg | 3309 |
| cctccttcatccagacagc | 543 | gctgtctggatgaaggagg | 1477 | accttctccatctacgccc | 2411 | gggcgtagatggagaaggt | 3310 |
| ctccttcatccagacagca | 544 | tgctgtctggatgaaggag | 1478 | ccttctccatctacgcccg | 2412 | cgggcgtagatggagaagg | 3311 |
| tccttcatccagacagcag | 545 | ctgctgtctggatgaagga | 1479 | cttctccatctacgcccgg | 2413 | ccgggcgtagatggagaag | 3312 |
| ccttcatccagacagcagg | 546 | cctgctgtctggatgaagg | 1480 | ttctccatctacgcccggg | 2414 | cccgggcgtagatggagaa | 3313 |
| cttcatccagacagcaggt | 547 | acctgctgtctggatgaag | 1481 | tctccatctacgcccgggg | 2415 | ccccgggcgtagatggaga | 3314 |
| ttcatccagacagcaggtc | 548 | gacctgctgtctggatgaa | 1482 | ctccatctacgcccggggc | 2416 | gccccgggcgtagatggag | 3315 |
| tcatccagacagcaggtct | 549 | agacctgctgtctggatga | 1483 | tccatctacgcccggggcc | 2417 | ggccccgggcgtagatgga | 3316 |
| catccagacagcaggtctc | 550 | gagacctgctgtctggatg | 1484 | ccatctacgcccggggccg | 2418 | cggccccgggcgtagatgg | 3317 |
| atccagacagcaggtctca | 551 | tgagacctgctgtctggat | 1485 | catctacgcccggggccgc | 2419 | gcggccccgggcgtagatg | 3318 |
| tccagacagcaggtctcat | 552 | atgagacctgctgtctgga | 1486 | atctacgcccggggccgct | 2420 | agcggccccgggcgtagat | 3319 |
| ccagacagcaggtctcatc | 553 | gatgagacctgctgtctgg | 1487 | tctacgcccggggccgcta | 2421 | tagcggccccgggcgtaga | 3320 |
| cagacagcaggtctcatcc | 554 | ggatgagacctgctgtctg | 1488 | ctacgcccggggccgctac | 2422 | gtagcggccccgggcgtag | 3321 |
| agacagcaggtctcatcct | 555 | aggatgagacctgctgtct | 1489 | tacgcccggggccgctaca | 2423 | tgtagcggccccgggcgta | 3322 |
| gacagcaggtctcatccta | 556 | taggatgagacctgctgtc | 1490 | acgcccggggccgctacag | 2424 | ctgtagcggccccgggcgt | 3323 |
| acagcaggtctcatcctag | 557 | ctaggatgagacctgctgt | 1491 | cgcccggggccgctacagc | 2425 | gctgtagcggccccgggcg | 3324 |
| cagcaggtctcatcctagg | 558 | cctaggatgagacctgctg | 1492 | gcccggggccgctacagcc | 2426 | ggctgtagcggccccgggc | 3325 |
| agcaggtctcatcctaggt | 559 | acctaggatgagacctgct | 1493 | cccggggccgctacagccg | 2427 | cggctgtagcggccccggg | 3326 |
| gcaggtctcatcctaggtc | 560 | gacctaggatgagacctgc | 1494 | ccggggccgctacagccgc | 2428 | gcggctgtagcggccccgg | 3327 |
| caggtctcatcctaggtcc | 561 | ggacctaggatgagacctg | 1495 | cggggccgctacagccgcg | 2429 | cgcggctgtagcggccccg | 3328 |
| aggtctcatcctaggtcct | 562 | aggacctaggatgagacct | 1496 | ggggccgctacagccgcgg | 2430 | ccgcggctgtagcggcccc | 3329 |
| ggtctcatcctaggtcctt | 563 | aaggacctaggatgagacc | 1497 | gggccgctacagccgcggc | 2431 | gccgcggctgtagcggccc | 3330 |
| gtctcatcctaggtcctta | 564 | taaggacctaggatgagac | 1498 | ggccgctacagccgcggcg | 2432 | cgccgcggctgtagcggcc | 3331 |
| tctcatcctaggtccttag | 565 | ctaaggacctaggatgaga | 1499 | gccgctacagccgcggcgt | 2433 | acgccgcggctgtagcggc | 3332 |
| ctcatcctaggtccttaga | 566 | tctaaggacctaggatgag | 1500 | ccgctacagccgcggcgtc | 2434 | gacgccgcggctgtagcgg | 3333 |
| tcatcctaggtccttagag | 567 | ctctaaggacctaggatga | 1501 | cgctacagccgcggcgtcc | 2435 | ggacgccgcggctgtagcg | 3334 |
| catcctaggtccttagaga | 568 | tctctaaggacctaggatg | 1502 | gctacagccgcggcgtcct | 2436 | aggacgccgcggctgtagc | 3335 |
| atcctaggtccttagagaa | 569 | ttctctaaggacctaggat | 1503 | ctacagccgcggcgtcctc | 2437 | gaggacgccgcggctgtag | 3336 |
| tcctaggtccttagagaaa | 570 | tttctctaaggacctagga | 1504 | tacagccgcggcgtcctct | 2438 | agaggacgccgcggctgta | 3337 |
| cctaggtccttagagaaaa | 571 | ttttctctaaggacctagg | 1505 | acagccgcggcgtcctctc | 2439 | gagaggacgccgcggctgt | 3338 |
| ctaggtccttagagaaaag | 572 | cttttctctaaggacctag | 1506 | cagccgcggcgtcctctcg | 2440 | cgagaggacgccgcggctg | 3339 |
| taggtccttagagaaaagt | 573 | acttttctctaaggaccta | 1507 | agccgcggcgtcctctcgt | 2441 | acgagaggacgccgcggct | 3340 |
| aggtccttagagaaaagtg | 574 | cacttttctctaaggacct | 1508 | gccgcggcgtcctctcgtc | 2442 | gacgagaggacgccgcggc | 3341 |
| ggtccttagagaaaagtgc | 575 | gcacttttctctaaggacc | 1509 | ccgcggcgtcctctcgtcc | 2443 | ggacgagaggacgccgcgg | 3342 |
| gtccttagagaaaagtgcc | 576 | ggcacttttctctaaggac | 1510 | cgcggcgtcctctcgtcca | 2444 | tggacgagaggacgccgcg | 3343 |
| tccttagagaaaagtgcct | 577 | aggcacttttctctaagga | 1511 | gcggcgtcctctcgtccag | 2445 | ctggacgagaggacgccgc | 3344 |
| ccttagagaaaagtgcctg | 578 | caggcacttttctctaagg | 1512 | cggcgtcctctcgtccagg | 2446 | cctggacgagaggacgccg | 3345 |
| cttagagaaaagtgcctgg | 579 | ccaggcacttttctctaag | 1513 | ggcgtcctctcgtccaggg | 2447 | ccctggacgagaggacgcc | 3346 |
| ttagagaaaagtgcctgga | 580 | tccaggcacttttctctaa | 1514 | gcgtcctctcgtccagggt | 2448 | accctggacgagaggacgc | 3347 |
| tagagaaaagtgcctggag | 581 | ctccaggcacttttctcta | 1515 | cgtcctctcgtccagggtc | 2449 | gaccctggacgagaggacg | 3348 |
| agagaaaagtgcctggagg | 582 | cctccaggcacttttctct | 1516 | gtcctctcgtccagggtca | 2450 | tgaccctggacgagaggac | 3349 |
| gagaaaagtgcctggaggg | 583 | ccctccaggcacttttctc | 1517 | tcctctcgtccagggtcat | 2451 | atgaccctggacgagagga | 3350 |
| agaaaagtgcctggagggc | 584 | gccctccaggcacttttct | 1518 | cctctcgtccagggtcatg | 2452 | catgaccctggacgagagg | 3351 |
| gaaaagtgcctggagggct | 585 | agccctccaggcacttttc | 1519 | ctctcgtccagggtcatgg | 2453 | ccatgaccctggacgagag | 3352 |
| aaaagtgcctggagggctt | 586 | aagccctccaggcactttt | 1520 | tctcgtccagggtcatggg | 2454 | cccatgaccctggacgaga | 3353 |
| aaagtgcctggagggcttt | 587 | aaagccctccaggcacttt | 1521 | ctcgtccagggtcatggga | 2455 | tcccatgaccctggacgag | 3354 |
| aagtgcctggagggctttt | 588 | aaaagccctccaggcactt | 1522 | tcgtccagggtcatgggag | 2456 | ctcccatgaccctggacga | 3355 |
| agtgcctggagggctttta | 589 | taaaagccctccaggcact | 1523 | cgtccagggtcatgggagg | 2457 | cctcccatgaccctggacg | 3356 |
| gtgcctggagggcttttaa | 590 | ttaaaagccctccaggcac | 1524 | gtccagggtcatgggaggc | 2458 | gcctcccatgaccctggac | 3357 |
| tgcctggagggcttttaag | 591 | cttaaaagccctccaggca | 1525 | tccagggtcatgggaggca | 2459 | tgcctcccatgaccctgga | 3358 |
| gcctggagggcttttaagg | 592 | ccttaaaagccctccaggc | 1526 | ccagggtcatgggaggcac | 2460 | gtgcctcccatgaccctgg | 3359 |
| cctggagggcttttaagga | 593 | tccttaaaagccctccagg | 1527 | cagggtcatgggaggcacc | 2461 | ggtgcctcccatgaccctg | 3360 |
| ctggagggcttttaaggag | 594 | ctccttaaaagccctccag | 1528 | agggtcatgggaggcaccg | 2462 | cggtgcctcccatgaccct | 3361 |
| tggagggcttttaaggagt | 595 | actccttaaaagccctcca | 1529 | gggtcatgggaggcaccga | 2463 | tcggtgcctcccatgaccc | 3362 |
| ggagggcttttaaggagtc | 596 | gactccttaaaagccctcc | 1530 | ggtcatgggaggcaccgag | 2464 | ctcggtgcctcccatgacc | 3363 |
| gagggcttttaaggagtca | 597 | tgactccttaaaagccctc | 1531 | gtcatgggaggcaccgagt | 2465 | actcggtgcctcccatgac | 3364 |
| agggcttttaaggagtcac | 598 | gtgactccttaaaagccct | 1532 | tcatgggaggcaccgagtt | 2466 | aactcggtgcctcccatga | 3365 |
| gggcttttaaggagtcaca | 599 | tgtgactccttaaaagccc | 1533 | catgggaggcaccgagttc | 2467 | gaactcggtgcctcccatg | 3366 |
| ggcttttaaggagtcacag | 600 | ctgtgactccttaaaagcc | 1534 | atgggaggcaccgagttcg | 2468 | cgaactcggtgcctcccat | 3367 |
| gcttttaaggagtcacagt | 601 | actgtgactccttaaaagc | 1535 | tgggaggcaccgagttcgt | 2469 | acgaactcggtgcctccca | 3368 |
| cttttaaggagtcacagtg | 602 | cactgtgactccttaaaag | 1536 | gggaggcaccgagttcgtg | 2470 | cacgaactcggtgcctccc | 3369 |
| ttttaaggagtcacagtgc | 603 | gcactgtgactccttaaaa | 1537 | ggaggcaccgagttcgtgt | 2471 | acacgaactcggtgcctcc | 3370 |
| tttaaggagtcacagtgcc | 604 | ggcactgtgactccttaaa | 1538 | gaggcaccgagttcgtgtt | 2472 | aacacgaactcggtgcctc | 3371 |
| ttaaggagtcacagtgcca | 605 | tggcactgtgactccttaa | 1539 | aggcaccgagttcgtgttc | 2473 | gaacacgaactcggtgcct | 3372 |
| taaggagtcacagtgccat | 606 | atggcactgtgactcctta | 1540 | ggcaccgagttcgtgttca | 2474 | tgaacacgaactcggtgcc | 3373 |
| aaggagtcacagtgccatc | 607 | gatggcactgtgactcctt | 1541 | gcaccgagttcgtgttcaa | 2475 | ttgaacacgaactcggtgc | 3374 |
| aggagtcacagtgccatca | 608 | tgatggcactgtgactcct | 1542 | caccgagttcgtgttcaaa | 2476 | tttgaacacgaactcggtg | 3375 |
| ggagtcacagtgccatcac | 609 | gtgatggcactgtgactcc | 1543 | accgagttcgtgttcaaag | 2477 | ctttgaacacgaactcggt | 3376 |
| gagtcacagtgccatcaca | 610 | tgtgatggcactgtgactc | 1544 | ccgagttcgtgttcaaagt | 2478 | actttgaacacgaactcgg | 3377 |
| agtcacagtgccatcacat | 611 | atgtgatggcactgtgact | 1545 | cgagttcgtgttcaaagtg | 2479 | cactttgaacacgaactcg | 3378 |
| gtcacagtgccatcacatg | 612 | catgtgatggcactgtgac | 1546 | gagttcgtgttcaaagtga | 2480 | tcactttgaacacgaactc | 3379 |
| tcacagtgccatcacatgc | 613 | gcatgtgatggcactgtga | 1547 | agttcgtgttcaaagtgaa | 2481 | ttcactttgaacacgaact | 3380 |
| cacagtgccatcacatgct | 614 | agcatgtgatggcactgtg | 1548 | gttcgtgttcaaagtgaat | 2482 | attcactttgaacacgaac | 3381 |
| acagtgccatcacatgctc | 615 | gagcatgtgatggcactgt | 1549 | ttcgtgttcaaagtgaatc | 2483 | gattcactttgaacacgaa | 3382 |
| cagtgccatcacatgctca | 616 | tgagcatgtgatggcactg | 1550 | tcgtgttcaaagtgaatca | 2484 | tgattcactttgaacacga | 3383 |
| agtgccatcacatgctcaa | 617 | ttgagcatgtgatggcact | 1551 | cgtgttcaaagtgaatcac | 2485 | gtgattcactttgaacacg | 3384 |
| gtgccatcacatgctcaaa | 618 | tttgagcatgtgatggcac | 1552 | gtgttcaaagtgaatcaca | 2486 | tgtgattcactttgaacac | 3385 |
| tgccatcacatgctcaaac | 619 | gtttgagcatgtgatggca | 1553 | tgttcaaagtgaatcacat | 2487 | atgtgattcactttgaaca | 3386 |
| gccatcacatgctcaaaca | 620 | tgtttgagcatgtgatggc | 1554 | gttcaaagtgaatcacatg | 2488 | catgtgattcactttgaac | 3387 |
| ccatcacatgctcaaacat | 621 | atgtttgagcatgtgatgg | 1555 | ttcaaagtgaatcacatga | 2489 | tcatgtgattcactttgaa | 3388 |
| catcacatgctcaaacatc | 622 | gatgtttgagcatgtgatg | 1556 | tcaaagtgaatcacatgaa | 2490 | ttcatgtgattcactttga | 3389 |
| atcacatgctcaaacatct | 623 | agatgtttgagcatgtgat | 1557 | caaagtgaatcacatgaag | 2491 | cttcatgtgattcactttg | 3390 |
| tcacatgctcaaacatctc | 624 | gagatgtttgagcatgtga | 1558 | aaagtgaatcacatgaagg | 2492 | ccttcatgtgattcacttt | 3391 |
| cacatgctcaaacatctcc | 625 | ggagatgtttgagcatgtg | 1559 | aagtgaatcacatgaaggt | 2493 | accttcatgtgattcactt | 3392 |
| acatgctcaaacatctcca | 626 | tggagatgtttgagcatgt | 1560 | agtgaatcacatgaaggtc | 2494 | gaccttcatgtgattcact | 3393 |
| catgctcaaacatctccac | 627 | gtggagatgtttgagcatg | 1561 | gtgaatcacatgaaggtca | 2495 | tgaccttcatgtgattcac | 3394 |
| atgctcaaacatctccaca | 628 | tgtggagatgtttgagcat | 1562 | tgaatcacatgaaggtcac | 2496 | gtgaccttcatgtgattca | 3395 |
| tgctcaaacatctccacaa | 629 | ttgtggagatgtttgagca | 1563 | gaatcacatgaaggtcacc | 2497 | ggtgaccttcatgtgattc | 3396 |
| gctcaaacatctccacaat | 630 | attgtggagatgtttgagc | 1564 | aatcacatgaaggtcaccc | 2498 | gggtgaccttcatgtgatt | 3397 |
| ctcaaacatctccacaatg | 631 | cattgtggagatgtttgag | 1565 | atcacatgaaggtcacccc | 2499 | ggggtgaccttcatgtgat | 3398 |
| tcaaacatctccacaatgg | 632 | ccattgtggagatgtttga | 1566 | tcacatgaaggtcaccccc | 2500 | gggggtgaccttcatgtga | 3399 |
| caaacatctccacaatggt | 633 | accattgtggagatgtttg | 1567 | cacatgaaggtcaccccca | 2501 | tgggggtgaccttcatgtg | 3400 |
| aaacatctccacaatggtg | 634 | caccattgtggagatgttt | 1568 | acatgaaggtcacccccat | 2502 | atgggggtgaccttcatgt | 3401 |
| aacatctccacaatggtgc | 635 | gcaccattgtggagatgtt | 1569 | catgaaggtcacccccatg | 2503 | catgggggtgaccttcatg | 3402 |
| acatctccacaatggtgca | 636 | tgcaccattgtggagatgt | 1570 | atgaaggtcacccccatgg | 2504 | ccatgggggtgaccttcat | 3403 |
| catctccacaatggtgcaa | 637 | ttgcaccattgtggagatg | 1571 | tgaaggtcacccccatgga | 2505 | tccatgggggtgaccttca | 3404 |
| atctccacaatggtgcaag | 638 | cttgcaccattgtggagat | 1572 | gaaggtcacccccatggat | 2506 | atccatgggggtgaccttc | 3405 |
| tctccacaatggtgcaagg | 639 | ccttgcaccattgtggaga | 1573 | aaggtcacccccatggatg | 2507 | catccatgggggtgacctt | 3406 |
| ctccacaatggtgcaagga | 640 | tccttgcaccattgtggag | 1574 | aggtcacccccatggatgc | 2508 | gcatccatgggggtgacct | 3407 |
| tccacaatggtgcaaggat | 641 | atccttgcaccattgtgga | 1575 | ggtcacccccatggatgcg | 2509 | cgcatccatgggggtgacc | 3408 |
| ccacaatggtgcaaggatc | 642 | gatccttgcaccattgtgg | 1576 | gtcacccccatggatgcgg | 2510 | ccgcatccatgggggtgac | 3409 |
| cacaatggtgcaaggatca | 643 | tgatccttgcaccattgtg | 1577 | tcacccccatggatgcggc | 2511 | gccgcatccatgggggtga | 3410 |
| acaatggtgcaaggatcac | 644 | gtgatccttgcaccattgt | 1578 | cacccccatggatgcggcc | 2512 | ggccgcatccatgggggtg | 3411 |
| caatggtgcaaggatcaca | 645 | tgtgatccttgcaccattg | 1579 | acccccatggatgcggcca | 2513 | tggccgcatccatgggggt | 3412 |
| aatggtgcaaggatcacag | 646 | ctgtgatccttgcaccatt | 1580 | cccccatggatgcggccac | 2514 | gtggccgcatccatggggg | 3413 |
| atggtgcaaggatcacagt | 647 | actgtgatccttgcaccat | 1581 | ccccatggatgcggccaca | 2515 | tgtggccgcatccatgggg | 3414 |
| tggtgcaaggatcacagtg | 648 | cactgtgatccttgcacca | 1582 | cccatggatgcggccacag | 2516 | ctgtggccgcatccatggg | 3415 |
| ggtgcaaggatcacagtgc | 649 | gcactgtgatccttgcacc | 1583 | ccatggatgcggccacagc | 2517 | gctgtggccgcatccatgg | 3416 |
| gtgcaaggatcacagtgca | 650 | tgcactgtgatccttgcac | 1584 | catggatgcggccacagcc | 2518 | ggctgtggccgcatccatg | 3417 |
| tgcaaggatcacagtgcag | 651 | ctgcactgtgatccttgca | 1585 | atggatgcggccacagcct | 2519 | aggctgtggccgcatccat | 3418 |
| gcaaggatcacagtgcaga | 652 | tctgcactgtgatccttgc | 1586 | tggatgcggccacagcctc | 2520 | gaggctgtggccgcatcca | 3419 |
| caaggatcacagtgcagat | 653 | atctgcactgtgatccttg | 1587 | ggatgcggccacagcctca | 2521 | tgaggctgtggccgcatcc | 3420 |
| aaggatcacagtgcagatg | 654 | catctgcactgtgatcctt | 1588 | gatgcggccacagcctcac | 2522 | gtgaggctgtggccgcatc | 3421 |
| aggatcacagtgcagatgc | 655 | gcatctgcactgtgatcct | 1589 | atgcggccacagcctcact | 2523 | agtgaggctgtggccgcat | 3422 |
| ggatcacagtgcagatgcc | 656 | ggcatctgcactgtgatcc | 1590 | tgcggccacagcctcactg | 2524 | cagtgaggctgtggccgca | 3423 |
| gatcacagtgcagatgcca | 657 | tggcatctgcactgtgatc | 1591 | gcggccacagcctcactgc | 2525 | gcagtgaggctgtggccgc | 3424 |
| atcacagtgcagatgccac | 658 | gtggcatctgcactgtgat | 1592 | cggccacagcctcactgct | 2526 | agcagtgaggctgtggcc | 3425 |
| tcacagtgcagatgccacc | 659 | ggtggcatctgcactgtga | 1593 | taataataattaagagaaa | 2527 | | |
| cacagtgcagatgccacct | 660 | aggtggcatctgcactgtg | 1594 | ttctcttaattattattat | 2528 | ataataataattaagagaa | 3426 |
| acagtgcagatgccaccta | 661 | taggtggcatctgcactgt | 1595 | tctcttaattattattata | 2529 | tataataataattaagaga | 3427 |
| cagtgcagatgccacctac | 662 | gtaggtggcatctgcactg | 1596 | ctcttaattattattatat | 2530 | atataataataattaagag | 3428 |
| agtgcagatgccacctaca | 663 | tgtaggtggcatctgcact | 1597 | tcttaattattattatatt | 2531 | aatataataataattaaga | 3429 |
| gtgcagatgccacctacaa | 664 | ttgtaggtggcatctgcac | 1598 | cttaattattattatattt | 2532 | aaatataataataattaag | 3430 |
| tgcagatgccacctacaat | 665 | attgtaggtggcatctgca | 1599 | ttaattattattatatttc | 2533 | gaaatataataataattaa | 3431 |
| gcagatgccacctacaatc | 666 | gattgtaggtggcatctgc | 1600 | taattattattatatttct | 2534 | agaaatataataataatta | 3432 |
| cagatgccacctacaatcg | 667 | cgattgtaggtggcatctg | 1601 | aattattattatatttctg | 2535 | cagaaatataataataatt | 3433 |
| agatgccacctacaatcga | 668 | tcgattgtaggtggcatct | 1602 | attattattatatttctga | 2536 | tcagaaatataataataat | 3434 |
| gatgccacctacaatcgag | 669 | ctcgattgtaggtggcatc | 1603 | ttattattatatttctgag | 2537 | ctcagaaatataataataa | 3435 |
| atgccacctacaatcgagg | 670 | cctcgattgtaggtggcat | 1604 | tattattatatttctgagt | 2538 | actcagaaatataataata | 3436 |
| tgccacctacaatcgaggg | 671 | ccctcgattgtaggtggca | 1605 | attattatatttctgagtt | 2539 | aactcagaaatataataat | 3437 |
| gccacctacaatcgagggc | 672 | gccctcgattgtaggtggc | 1606 | ttattatatttctgagtta | 2540 | taactcagaaatataataa | 3438 |
| ccacctacaatcgagggcc | 673 | ggccctcgattgtaggtgg | 1607 | tattatatttctgagttaa | 2541 | ttaactcagaaatataata | 3439 |
| cacctacaatcgagggcca | 674 | tggccctcgattgtaggtg | 1608 | attatatttctgagttaaa | 2542 | tttaactcagaaatataat | 3440 |
| acctacaatcgagggccac | 675 | gtggccctcgattgtaggt | 1609 | ttatatttctgagttaaac | 2543 | gtttaactcagaaatataa | 3441 |
| cctacaatcgagggccact | 676 | agtggccctcgattgtagg | 1610 | tatatttctgagttaaact | 2544 | agtttaactcagaaatata | 3442 |
| ctacaatcgagggccactg | 677 | cagtggccctcgattgtag | 1611 | atatttctgagttaaactt | 2545 | aagtttaactcagaaatat | 3443 |
| tacaatcgagggccactgg | 678 | ccagtggccctcgattgta | 1612 | tatttctgagttaaactta | 2546 | taagtttaactcagaaata | 3444 |
| acaatcgagggccactggg | 679 | cccagtggccctcgattgt | 1613 | atttctgagttaaacttag | 2547 | ctaagtttaactcagaaat | 3445 |
| caatcgagggccactgggt | 680 | acccagtggccctcgattg | 1614 | tttctgagttaaacttaga | 2548 | tctaagtttaactcagaaa | 3446 |
| aatcgagggccactgggtc | 681 | gacccagtggccctcgatt | 1615 | ttctgagttaaacttagaa | 2549 | ttctaagtttaactcagaa | 3447 |
| atcgagggccactgggtct | 682 | agacccagtggccctcgat | 1616 | tctgagttaaacttagaag | 2550 | cttctaagtttaactcaga | 3448 |
| tcgagggccactgggtctc | 683 | gagacccagtggccctcga | 1617 | ctgagttaaacttagaaga | 2551 | tcttctaagtttaactcag | 3449 |
| cgagggccactgggtctcc | 684 | ggagacccagtggccctcg | 1618 | tgagttaaacttagaagaa | 2552 | ttcttctaagtttaactca | 3450 |
| gagggccactgggtctcca | 685 | tggagacccagtggccctc | 1619 | gagttaaacttagaagaaa | 2553 | tttcttctaagtttaactc | 3451 |
| agggccactgggtctccac | 686 | gtggagacccagtggccct | 1620 | agttaaacttagaagaaac | 2554 | gtttcttctaagtttaact | 3452 |
| gggccactgggtctccaca | 687 | tgtggagacccagtggccc | 1621 | gttaaacttagaagaaaca | 2555 | tgtttcttctaagtttaac | 3453 |
| ggccactgggtctccacag | 688 | ctgtggagacccagtggcc | 1622 | ttaaacttagaagaaacaa | 2556 | ttgtttcttctaagtttaa | 3454 |
| gccactgggtctccacagg | 689 | cctgtggagacccagtggc | 1623 | taaacttagaagaaacaac | 2557 | gttgtttcttctaagttta | 3455 |
| ccactgggtctccacaggc | 690 | gcctgtggagacccagtgg | 1624 | aaacttagaagaaacaact | 2558 | agttgtttcttctaagttt | 3456 |
| cactgggtctccacaggct | 691 | agcctgtggagacccagtg | 1625 | aacttagaagaaacaacta | 2559 | tagttgtttcttctaagtt | 3457 |
| actgggtctccacaggctg | 692 | cagcctgtggagacccagt | 1626 | acttagaagaaacaactat | 2560 | atagttgtttcttctaagt | 3458 |
| ctgggtctccacaggctgt | 693 | acagcctgtggagacccag | 1627 | cttagaagaaacaactatc | 2561 | gatagttgtttcttctaag | 3459 |
| tgggtctccacaggctgtg | 694 | cacagcctgtggagaccca | 1628 | ttagaagaaacaactatca | 2562 | tgatagttgtttcttctaa | 3460 |
| gggtctccacaggctgtga | 695 | tcacagcctgtggagaccc | 1629 | tagaagaaacaactatcaa | 2563 | ttgatagttgtttcttcta | 3461 |
| ggtctccacaggctgtgaa | 696 | ttcacagcctgtggagacc | 1630 | agaagaaacaactatcaag | 2564 | cttgatagttgtttcttct | 3462 |
| gtctccacaggctgtgaag | 697 | cttcacagcctgtggagac | 1631 | gaagaaacaactatcaagc | 2565 | gcttgatagttgtttcttc | 3463 |
| tctccacaggctgtgaagt | 698 | acttcacagcctgtggaga | 1632 | aagaaacaactatcaagct | 2566 | agcttgatagttgtttctt | 3464 |
| ctccacaggctgtgaagta | 699 | tacttcacagcctgtggag | 1633 | agaaacaactatcaagcta | 2567 | tagcttgatagttgtttct | 3465 |
| tccacaggctgtgaagtaa | 700 | ttacttcacagcctgtgga | 1634 | gaaacaactatcaagctac | 2568 | gtagcttgatagttgtttc | 3466 |
| ccacaggctgtgaagtaag | 701 | cttacttcacagcctgtgg | 1635 | aaacaactatcaagctaca | 2569 | tgtagcttgatagttgttt | 3467 |
| cacaggctgtgaagtaagg | 702 | ccttacttcacagcctgtg | 1636 | aacaactatcaagctacaa | 2570 | ttgtagcttgatagttgtt | 3468 |
| acaggctgtgaagtaaggt | 703 | accttacttcacagcctgt | 1637 | acaactatcaagctacaac | 2571 | gttgtagcttgatagttgt | 3469 |
| caggctgtgaagtaaggtc | 704 | gaccttacttcacagcctg | 1638 | caactatcaagctacaact | 2572 | agttgtagcttgatagttg | 3470 |
| aggctgtgaagtaaggtca | 705 | tgaccttacttcacagcct | 1639 | aactatcaagctacaactt | 2573 | aagttgtagcttgatagtt | 3471 |
| ggctgtgaagtaaggtcag | 706 | ctgaccttacttcacagcc | 1640 | actatcaagctacaacttt | 2574 | aaagttgtagcttgatagt | 3472 |
| gctgtgaagtaaggtcagg | 707 | cctgaccttacttcacagc | 1641 | ctatcaagctacaactttt | 2575 | aaaagttgtagcttgatag | 3473 |
| ctgtgaagtaaggtcaggc | 708 | gcctgaccttacttcacag | 1642 | tatcaagctacaacttttc | 2576 | gaaaagttgtagcttgata | 3474 |
| tgtgaagtaaggtcaggcc | 709 | ggcctgaccttacttcaca | 1643 | atcaagctacaacttttcc | 2577 | ggaaaagttgtagcttgat | 3475 |
| gtgaagtaaggtcaggccc | 710 | gggcctgaccttacttcac | 1644 | tcaagctacaacttttcct | 2578 | aggaaaagttgtagcttga | 3476 |
| tgaagtaaggtcaggccca | 711 | tgggcctgaccttacttca | 1645 | caagctacaacttttcctg | 2579 | caggaaaagttgtagcttg | 3477 |
| gaagtaaggtcaggcccag | 712 | ctgggcctgaccttacttc | 1646 | aagctacaacttttcctgc | 2580 | gcaggaaaagttgtagctt | 3478 |
| aagtaaggtcaggcccaga | 713 | tctgggcctgaccttactt | 1647 | agctacaacttttcctgcc | 2581 | ggcaggaaaagttgtagct | 3479 |
| agtaaggtcaggcccagag | 714 | ctctgggcctgaccttact | 1648 | gctacaacttttcctgcca | 2582 | tggcaggaaaagttgtagc | 3480 |
| gtaaggtcaggcccagagt | 715 | actctgggcctgaccttac | 1649 | ctacaacttttcctgccat | 2583 | atggcaggaaaagttgtag | 3481 |
| taaggtcaggcccagagtt | 716 | aactctgggcctgacctta | 1650 | tacaacttttcctgccatt | 2584 | aatggcaggaaaagttgta | 3482 |
| aaggtcaggcccagagttc | 717 | gaactctgggcctgacctt | 1651 | acaacttttcctgccattt | 2585 | aaatggcaggaaaagttgt | 3483 |
| aggtcaggcccagagttca | 718 | tgaactctgggcctgacct | 1652 | caacttttcctgccatttt | 2586 | aaaatggcaggaaaagttg | 3484 |
| ggtcaggcccagagttcat | 719 | atgaactctgggcctgacc | 1653 | aacttttcctgccattttc | 2587 | gaaaatggcaggaaaagtt | 3485 |
| gtcaggcccagagttcatc | 720 | gatgaactctgggcctgac | 1654 | acttttcctgccattttcc | 2588 | ggaaaatggcaggaaaagt | 3486 |
| tcaggcccagagttcatca | 721 | tgatgaactctgggcctga | 1655 | cttttcctgccattttcct | 2589 | aggaaaatggcaggaaaag | 3487 |
| caggcccagagttcatcac | 722 | gtgatgaactctgggcctg | 1656 | ttttcctgccattttcctg | 2590 | caggaaaatggcaggaaaa | 3488 |
| aggcccagagttcatcaca | 723 | tgtgatgaactctgggcct | 1657 | tttcctgccattttcctgt | 2591 | acaggaaaatggcaggaaa | 3489 |
| ggcccagagttcatcacaa | 724 | ttgtgatgaactctgggcc | 1658 | ttcctgccattttcctgtg | 2592 | cacaggaaaatggcaggaa | 3490 |
| gcccagagttcatcacaag | 725 | cttgtgatgaactctgggc | 1659 | tcctgccattttcctgtgg | 2593 | ccacaggaaaatggcagga | 3491 |
| cccagagttcatcacaagg | 726 | ccttgtgatgaactctggg | 1660 | cctgccattttcctgtggt | 2594 | accacaggaaaatggcagg | 3492 |
| ccagagttcatcacaaggt | 727 | accttgtgatgaactctgg | 1661 | ctgccattttcctgtggtt | 2595 | aaccacaggaaaatggcag | 3493 |
| cagagttcatcacaaggtc | 728 | gaccttgtgatgaactctg | 1662 | tgccattttcctgtggttg | 2596 | caaccacaggaaaatggca | 3494 |
| agagttcatcacaaggtcc | 729 | ggaccttgtgatgaactct | 1663 | gccattttcctgtggttgc | 2597 | gcaaccacaggaaaatggc | 3495 |
| gagttcatcacaaggtcct | 730 | aggaccttgtgatgaactc | 1664 | ccattttcctgtggttgca | 2598 | tgcaaccacaggaaaatgg | 3496 |
| agttcatcacaaggtccta | 731 | taggaccttgtgatgaact | 1665 | cattttcctgtggttgcag | 2599 | ctgcaaccacaggaaaatg | 3497 |
| gttcatcacaaggtcctac | 732 | gtaggaccttgtgatgaac | 1666 | attttcctgtggttgcagc | 2600 | gctgcaaccacaggaaaat | 3498 |
| ttcatcacaaggtcctaca | 733 | tgtaggaccttgtgatgaa | 1667 | ttttcctgtggttgcagcc | 2601 | ggctgcaaccacaggaaaa | 3499 |
| tcatcacaaggtcctacag | 734 | ctgtaggaccttgtgatga | 1668 | tttcctgtggttgcagcct | 2602 | aggctgcaaccacaggaaa | 3500 |
| catcacaaggtcctacaga | 735 | tctgtaggaccttgtgatg | 1669 | ttcctgtggttgcagcctg | 2603 | caggctgcaaccacaggaa | 3501 |
| atcacaaggtcctacagat | 736 | atctgtaggaccttgtgat | 1670 | tcctgtggttgcagcctgt | 2604 | acaggctgcaaccacagga | 3502 |
| tcacaaggtcctacagatt | 737 | aatctgtaggaccttgtga | 1671 | cctgtggttgcagcctgtc | 2605 | gacaggctgcaaccacagg | 3503 |
| cacaaggtcctacagattc | 738 | gaatctgtaggaccttgtg | 1672 | ctgtggttgcagcctgtct | 2606 | agacaggctgcaaccacag | 3504 |
| acaaggtcctacagattct | 739 | agaatctgtaggaccttgt | 1673 | tgtggttgcagcctgtctt | 2607 | aagacaggctgcaaccaca | 3505 |
| caaggtcctacagattcta | 740 | tagaatctgtaggaccttg | 1674 | gtggttgcagcctgtcttc | 2608 | gaagacaggctgcaaccac | 3506 |
| aaggtcctacagattctac | 741 | gtagaatctgtaggacctt | 1675 | tggttgcagcctgtcttcc | 2609 | ggaagacaggctgcaacca | 3507 |
| aggtcctacagattctacc | 742 | ggtagaatctgtaggacct | 1676 | ggttgcagcctgtcttcct | 2610 | aggaagacaggctgcaacc | 3508 |
| ggtcctacagattctacca | 743 | tggtagaatctgtaggacc | 1677 | gttgcagcctgtcttcctt | 2611 | aaggaagacaggctgcaac | 3509 |
| gtcctacagattctaccac | 744 | gtggtagaatctgtaggac | 1678 | ttgcagcctgtcttccttt | 2612 | aaaggaagacaggctgcaa | 3510 |
| tcctacagattctaccaca | 745 | tgtggtagaatctgtagga | 1679 | tgcagcctgtcttcctttg | 2613 | caaaggaagacaggctgca | 3511 |
| cctacagattctaccacaa | 746 | ttgtggtagaatctgtagg | 1680 | gcagcctgtcttcctttga | 2614 | tcaaaggaagacaggctgc | 3512 |
| ctacagattctaccacaat | 747 | attgtggtagaatctgtag | 1681 | cagcctgtcttcctttgaa | 2615 | ttcaaaggaagacaggctg | 3513 |
| tacagattctaccacaata | 748 | tattgtggtagaatctgta | 1682 | agcctgtcttcctttgaaa | 2616 | tttcaaaggaagacaggct | 3514 |
| acagattctaccacaataa | 749 | ttattgtggtagaatctgt | 1683 | gcctgtcttcctttgaaat | 2617 | atttcaaaggaagacaggc | 3515 |
| cagattctaccacaataac | 750 | gttattgtggtagaatctg | 1684 | cctgtcttcctttgaaatt | 2618 | aatttcaaaggaagacagg | 3516 |
| agattctaccacaataaca | 751 | tgttattgtggtagaatct | 1685 | ctgtcttcctttgaaattg | 2619 | caatttcaaaggaagacag | 3517 |
| gattctaccacaataacac | 752 | gtgttattgtggtagaatc | 1686 | tgtcttcctttgaaattgt | 2620 | acaatttcaaaggaagaca | 3518 |
| attctaccacaataacacc | 753 | ggtgttattgtggtagaat | 1687 | gtcttcctttgaaattgtt | 2621 | aacaatttcaaaggaagac | 3519 |
| ttctaccacaataacacct | 754 | aggtgttattgtggtagaa | 1688 | tcttcctttgaaattgttt | 2622 | aaacaatttcaaaggaaga | 3520 |
| tctaccacaataacacctt | 755 | aaggtgttattgtggtaga | 1689 | cttcctttgaaattgtttt | 2623 | aaaacaatttcaaaggaag | 3521 |
| ctaccacaataacaccttc | 756 | gaaggtgttattgtggtag | 1690 | ttcctttgaaattgtttta | 2624 | taaaacaatttcaaaggaa | 3522 |
| taccacaataacaccttca | 757 | tgaaggtgttattgtggta | 1691 | tcctttgaaattgttttac | 2625 | gtaaaacaatttcaaagga | 3523 |
| accacaataacaccttcaa | 758 | ttgaaggtgttattgtggt | 1692 | cctttgaaattgttttact | 2626 | agtaaaacaatttcaaagg | 3524 |
| ccacaataacaccttcaag | 759 | cttgaaggtgttattgtgg | 1693 | ctttgaaattgttttactc | 2627 | gagtaaaacaatttcaaag | 3525 |
| cacaataacaccttcaagg | 760 | ccttgaaggtgttattgtg | 1694 | tttgaaattgttttactct | 2628 | agagtaaaacaatttcaaa | 3526 |
| acaataacaccttcaaggc | 761 | gccttgaaggtgttattgt | 1695 | ttgaaattgttttactctc | 2629 | gagagtaaaacaatttcaa | 3527 |
| caataacaccttcaaggcc | 762 | ggccttgaaggtgttattg | 1696 | tgaaattgttttactctct | 2630 | agagagtaaaacaatttca | 3528 |
| aataacaccttcaaggcct | 763 | aggccttgaaggtgttatt | 1697 | gaaattgttttactctctg | 2631 | cagagagtaaaacaatttc | 3529 |
| ataacaccttcaaggccta | 764 | taggccttgaaggtgttat | 1698 | aaattgttttactctctga | 2632 | tcagagagtaaaacaattt | 3530 |
| taacaccttcaaggcctac | 765 | gtaggccttgaaggtgtta | 1699 | aattgttttactctctgag | 2633 | ctcagagagtaaaacaatt | 3531 |
| aacaccttcaaggcctacc | 766 | ggtaggccttgaaggtgtt | 1700 | attgttttactctctgagt | 2634 | actcagagagtaaaacaat | 3532 |
| acaccttcaaggcctacca | 767 | tggtaggccttgaaggtgt | 1701 | ttgttttactctctgagtt | 2635 | aactcagagagtaaaacaa | 3533 |
| caccttcaaggcctaccaa | 768 | ttggtaggccttgaaggtg | 1702 | tgttttactctctgagttt | 2636 | aaactcagagagtaaaaca | 3534 |
| accttcaaggcctaccaat | 769 | attggtaggccttgaaggt | 1703 | gttttactctctgagtttt | 2637 | aaaactcagagagtaaaac | 3535 |
| ccttcaaggcctaccaatt | 770 | aattggtaggccttgaagg | 1704 | ttttactctctgagtttta | 2638 | taaaactcagagagtaaaa | 3536 |
| cttcaaggcctaccaattt | 771 | aaattggtaggccttgaag | 1705 | tttactctctgagttttat | 2639 | ataaaactcagagagtaaa | 3537 |
| ttcaaggcctaccaatttt | 772 | aaaattggtaggccttgaa | 1706 | ttactctctgagttttata | 2640 | tataaaactcagagagtaa | 3538 |
| tcaaggcctaccaatttta | 773 | taaaattggtaggccttga | 1707 | tactctctgagttttatat | 2641 | atataaaactcagagagta | 3539 |
| caaggcctaccaattttat | 774 | ataaaattggtaggccttg | 1708 | actctctgagttttatatg | 2642 | catataaaactcagagagt | 3540 |
| aaggcctaccaattttatt | 775 | aataaaattggtaggcctt | 1709 | ctctctgagttttatatgc | 2643 | gcatataaaactcagagag | 3541 |
| aggcctaccaattttatta | 776 | taataaaattggtaggcct | 1710 | tctctgagttttatatgct | 2644 | agcatataaaactcagaga | 3542 |
| ggcctaccaattttattat | 777 | ataataaaattggtaggcc | 1711 | ctctgagttttatatgctg | 2645 | cagcatataaaactcagag | 3543 |
| gcctaccaattttattatg | 778 | cataataaaattggtaggc | 1712 | tctgagttttatatgctgg | 2646 | ccagcatataaaactcaga | 3544 |
| cctaccaattttattatgg | 779 | ccataataaaattggtagg | 1713 | ctgagttttatatgctgga | 2647 | tccagcatataaaactcag | 3545 |
| ctaccaattttattatggc | 780 | gccataataaaattggtag | 1714 | tgagttttatatgctggaa | 2648 | ttccagcatataaaactca | 3546 |
| taccaattttattatggca | 781 | tgccataataaaattggta | 1715 | gagttttatatgctggaat | 2649 | attccagcatataaaactc | 3547 |
| accaattttattatggcag | 782 | ctgccataataaaattggt | 1716 | agttttatatgctggaatc | 2650 | gattccagcatataaaact | 3548 |
| ccaattttattatggcagc | 783 | gctgccataataaaattgg | 1717 | gttttatatgctggaatcc | 2651 | ggattccagcatataaaac | 3549 |
| caattttattatggcagca | 784 | tgctgccataataaaattg | 1718 | ttttatatgctggaatcca | 2652 | tggattccagcatataaaa | 3550 |
| aattttattatggcagcaa | 785 | ttgctgccataataaaatt | 1719 | tttatatgctggaatccaa | 2653 | ttggattccagcatataaa | 3551 |
| attttattatggcagcaac | 786 | gttgctgccataataaaat | 1720 | ttatatgctggaatccaat | 2654 | attggattccagcatataa | 3552 |
| ttttattatggcagcaacc | 787 | ggttgctgccataataaaa | 1721 | tatatgctggaatccaatg | 2655 | cattggattccagcatata | 3553 |
| tttattatggcagcaaccg | 788 | cggttgctgccataataaa | 1722 | atatgctggaatccaatgc | 2656 | gcattggattccagcatat | 3554 |
| ttattatggcagcaaccgg | 789 | ccggttgctgccataataa | 1723 | tatgctggaatccaatgca | 2657 | tgcattggattccagcata | 3555 |
| tattatggcagcaaccggt | 790 | accggttgctgccataata | 1724 | atgctggaatccaatgcag | 2658 | ctgcattggattccagcat | 3556 |
| attatggcagcaaccggtg | 791 | caccggttgctgccataat | 1725 | tgctggaatccaatgcaga | 2659 | tctgcattggattccagca | 3557 |
| ttatggcagcaaccggtgc | 792 | gcaccggttgctgccataa | 1726 | gctggaatccaatgcagag | 2660 | ctctgcattggattccagc | 3558 |
| tatggcagcaaccggtgca | 793 | tgcaccggttgctgccata | 1727 | ctggaatccaatgcagagt | 2661 | actctgcattggattccag | 3559 |
| atggcagcaaccggtgcac | 794 | gtgcaccggttgctgccat | 1728 | tggaatccaatgcagagtt | 2662 | aactctgcattggattcca | 3560 |
| tggcagcaaccggtgcaca | 795 | tgtgcaccggttgctgcca | 1729 | ggaatccaatgcagagttg | 2663 | caactctgcattggattcc | 3561 |
| ggcagcaaccggtgcacaa | 796 | ttgtgcaccggttgctgcc | 1730 | gaatccaatgcagagttgg | 2664 | ccaactctgcattggattc | 3562 |
| gcagcaaccggtgcacaaa | 797 | tttgtgcaccggttgctgc | 1731 | aatccaatgcagagttggt | 2665 | accaactctgcattggatt | 3563 |
| cagcaaccggtgcacaaat | 798 | atttgtgcaccggttgctg | 1732 | atccaatgcagagttggtt | 2666 | aaccaactctgcattggat | 3564 |
| agcaaccggtgcacaaatc | 799 | gatttgtgcaccggttgct | 1733 | tccaatgcagagttggttt | 2667 | aaaccaactctgcattgga | 3565 |
| gcaaccggtgcacaaatcc | 800 | ggatttgtgcaccggttgc | 1734 | ccaatgcagagttggtttg | 2668 | caaaccaactctgcattgg | 3566 |
| caaccggtgcacaaatccc | 801 | gggatttgtgcaccggttg | 1735 | caatgcagagttggtttgg | 2669 | ccaaaccaactctgcattg | 3567 |
| aaccggtgcacaaatccca | 802 | tgggatttgtgcaccggtt | 1736 | aatgcagagttggtttggg | 2670 | cccaaaccaactctgcatt | 3568 |
| accggtgcacaaatcccac | 803 | gtgggatttgtgcaccggt | 1737 | atgcagagttggtttggga | 2671 | tcccaaaccaactctgcat | 3569 |
| ccggtgcacaaatcccact | 804 | agtgggatttgtgcaccgg | 1738 | tgcagagttggtttgggac | 2672 | gtcccaaaccaactctgca | 3570 |
| cggtgcacaaatcccactt | 805 | aagtgggatttgtgcaccg | 1739 | gcagagttggtttgggact | 2673 | agtcccaaaccaactctgc | 3571 |
| ggtgcacaaatcccactta | 806 | taagtgggatttgtgcacc | 1740 | cagagttggtttgggactg | 2674 | cagtcccaaaccaactctg | 3572 |
| gtgcacaaatcccacttat | 807 | ataagtgggatttgtgcac | 1741 | agagttggtttgggactgt | 2675 | acagtcccaaaccaactct | 3573 |
| tgcacaaatcccacttata | 808 | tataagtgggatttgtgca | 1742 | gagttggtttgggactgtg | 2676 | cacagtcccaaaccaactc | 3574 |
| gcacaaatcccacttatac | 809 | gtataagtgggatttgtgc | 1743 | agttggtttgggactgtga | 2677 | tcacagtcccaaaccaact | 3575 |
| cacaaatcccacttatact | 810 | agtataagtgggatttgtg | 1744 | gttggtttgggactgtgat | 2678 | atcacagtcccaaaccaac | 3576 |
| acaaatcccacttatactc | 811 | gagtataagtgggatttgt | 1745 | ttggtttgggactgtgatc | 2679 | gatcacagtcccaaaccaa | 3577 |
| caaatcccacttatactct | 812 | agagtataagtgggatttg | 1746 | tggtttgggactgtgatca | 2680 | tgatcacagtcccaaacca | 3578 |
| aaatcccacttatactctc | 813 | gagagtataagtgggattt | 1747 | ggtttgggactgtgatcaa | 2681 | ttgatcacagtcccaaacc | 3579 |
| aatcccacttatactctca | 814 | tgagagtataagtgggatt | 1748 | gtttgggactgtgatcaag | 2682 | cttgatcacagtcccaaac | 3580 |
| atcccacttatactctcat | 815 | atgagagtataagtgggat | 1749 | tttgggactgtgatcaaga | 2683 | tcttgatcacagtcccaaa | 3581 |
| tcccacttatactctcatc | 816 | gatgagagtataagtggga | 1750 | ttgggactgtgatcaagac | 2684 | gtcttgatcacagtcccaa | 3582 |
| cccacttatactctcatca | 817 | tgatgagagtataagtggg | 1751 | tgggactgtgatcaagaca | 2685 | tgtcttgatcacagtccca | 3583 |
| ccacttatactctcatcat | 818 | atgatgagagtataagtgg | 1752 | gggactgtgatcaagacac | 2686 | gtgtcttgatcacagtccc | 3584 |
| cacttatactctcatcatc | 819 | gatgatgagagtataagtg | 1753 | ggactgtgatcaagacacc | 2687 | ggtgtcttgatcacagtcc | 3585 |
| acttatactctcatcatcc | 820 | ggatgatgagagtataagt | 1754 | gactgtgatcaagacacct | 2688 | aggtgtcttgatcacagtc | 3586 |
| cttatactctcatcatccg | 821 | cggatgatgagagtataag | 1755 | actgtgatcaagacacctt | 2689 | aaggtgtcttgatcacagt | 3587 |
| ttatactctcatcatccgg | 822 | ccggatgatgagagtataa | 1756 | ctgtgatcaagacaccttt | 2690 | aaaggtgtcttgatcacag | 3588 |
| tatactctcatcatccggg | 823 | cccggatgatgagagtata | 1757 | tgtgatcaagacacctttt | 2691 | aaaaggtgtcttgatcaca | 3589 |
| atactctcatcatccgggg | 824 | ccccggatgatgagagtat | 1758 | gtgatcaagacacctttta | 2692 | taaaaggtgtcttgatcac | 3590 |
| tactctcatcatccggggc | 825 | gccccggatgatgagagta | 1759 | tgatcaagacaccttttat | 2693 | ataaaaggtgtcttgatca | 3591 |
| actctcatcatccggggca | 826 | tgccccggatgatgagagt | 1760 | gatcaagacaccttttatt | 2694 | aataaaaggtgtcttgatc | 3592 |
| ctctcatcatccggggcaa | 827 | ttgccccggatgatgagag | 1761 | atcaagacaccttttatta | 2695 | taataaaaggtgtcttgat | 3593 |
| tctcatcatccggggcaag | 828 | cttgccccggatgatgaga | 1762 | tcaagacaccttttattaa | 2696 | ttaataaaaggtgtcttga | 3594 |
| ctcatcatccggggcaaga | 829 | tcttgccccggatgatgag | 1763 | caagacaccttttattaat | 2697 | attaataaaaggtgtcttg | 3595 |
| tcatcatccggggcaagat | 830 | atcttgccccggatgatga | 1764 | aagacaccttttattaata | 2698 | tattaataaaaggtgtctt | 3596 |
| catcatccggggcaagatc | 831 | gatcttgccccggatgatg | 1765 | agacaccttttattaataa | 2699 | ttattaataaaaggtgtct | 3597 |
| atcatccggggcaagatcc | 832 | ggatcttgccccggatgat | 1766 | gacaccttttattaataaa | 2700 | tttattaataaaaggtgtc | 3598 |
| tcatccggggcaagatccg | 833 | cggatcttgccccggatga | 1767 | acaccttttattaataaag | 2701 | ctttattaataaaaggtgt | 3599 |
| catccggggcaagatccgc | 834 | gcggatcttgccccggatg | 1768 | caccttttattaataaaga | 2702 | tctttattaataaaaggtg | 3600 |
| atccggggcaagatccgcc | 835 | ggcggatcttgccccggat | 1769 | accttttattaataaagaa | 2703 | ttctttattaataaaaggt | 3601 |
| tccggggcaagatccgcct | 836 | aggcggatcttgccccgga | 1770 | ccttttattaataaagaag | 2704 | cttctttattaataaaagg | 3602 |
| ccggggcaagatccgcctc | 837 | gaggcggatcttgccccgg | 1771 | cttttattaataaagaaga | 2705 | tcttctttattaataaaag | 3603 |
| cggggcaagatccgcctcc | 838 | ggaggcggatcttgccccg | 1772 | ttttattaataaagaagag | 2706 | ctcttctttattaataaaa | 3604 |
| ggggcaagatccgcctccg | 839 | cggaggcggatcttgcccc | 1773 | tttattaataaagaagaga | 2707 | tctcttctttattaataaa | 3605 |
| gggcaagatccgcctccgc | 840 | gcggaggcggatcttgccc | 1774 | ttattaataaagaagagac | 2708 | gtctcttctttattaataa | 3606 |
| ggcaagatccgcctccgcc | 841 | ggcggaggcggatcttgcc | 1775 | tattaataaagaagagaca | 2709 | tgtctcttctttattaata | 3607 |
| gcaagatccgcctccgcca | 842 | tggcggaggcggatcttgc | 1776 | attaataaagaagagacac | 2710 | gtgtctcttctttattaat | 3608 |
| caagatccgcctccgccag | 843 | ctggcggaggcggatcttg | 1777 | ttaataaagaagagacaca | 2711 | tgtgtctcttctttattaa | 3609 |
| aagatccgcctccgccagg | 844 | cctggcggaggcggatctt | 1778 | taataaagaagagacacag | 2712 | ctgtgtctcttctttatta | 3610 |
| agatccgcctccgccaggc | 845 | gcctggcggaggcggatct | 1779 | aataaagaagagacacagg | 2713 | cctgtgtctcttctttatt | 3611 |
| gatccgcctccgccaggcc | 846 | ggcctggcggaggcggatc | 1780 | ataaagaagagacacaggt | 2714 | acctgtgtctcttctttat | 3612 |
| atccgcctccgccaggcct | 847 | aggcctggcggaggcggat | 1781 | taaagaagagacacaggtg | 2715 | cacctgtgtctcttcttta | 3613 |
| tccgcctccgccaggcctc | 848 | gaggcctggcggaggcgga | 1782 | aaagaagagacacaggtgt | 2716 | acacctgtgtctcttcttt | 3614 |
| ccgcctccgccaggcctcc | 849 | ggaggcctggcggaggcgg | 1783 | aagaagagacacaggtgta | 2717 | tacacctgtgtctcttctt | 3615 |
| cgcctccgccaggcctcct | 850 | aggaggcctggcggaggcg | 1784 | agaagagacacaggtgtag | 2718 | ctacacctgtgtctcttct | 3616 |
| gcctccgccaggcctcctg | 851 | caggaggcctggcggaggc | 1785 | gaagagacacaggtgtaga | 2719 | tctacacctgtgtctcttc | 3617 |
| cctccgccaggcctcctgg | 852 | ccaggaggcctggcggagg | 1786 | aagagacacaggtgtagat | 2720 | atctacacctgtgtctctt | 3618 |
| ctccgccaggcctcctgga | 853 | tccaggaggcctggcggag | 1787 | agagacacaggtgtagata | 2721 | tatctacacctgtgtctct | 3619 |
| tccgccaggcctcctggat | 854 | atccaggaggcctggcgga | 1788 | gagacacaggtgtagatat | 2722 | atatctacacctgtgtctc | 3620 |
| ccgccaggcctcctggatc | 855 | gatccaggaggcctggcgg | 1789 | agacacaggtgtagatatg | 2723 | catatctacacctgtgtct | 3621 |
| cgccaggcctcctggatca | 856 | tgatccaggaggcctggcg | 1790 | gacacaggtgtagatatgt | 2724 | acatatctacacctgtgtc | 3622 |
| gccaggcctcctggatcat | 857 | atgatccaggaggcctggc | 1791 | acacaggtgtagatatgta | 2725 | tacatatctacacctgtgt | 3623 |
| ccaggcctcctggatcatc | 858 | gatgatccaggaggcctgg | 1792 | cacaggtgtagatatgtat | 2726 | atacatatctacacctgtg | 3624 |
| caggcctcctggatcatcc | 859 | ggatgatccaggaggcctg | 1793 | acaggtgtagatatgtata | 2727 | tatacatatctacacctgt | 3625 |
| aggcctcctggatcatccg | 860 | cggatgatccaggaggcct | 1794 | caggtgtagatatgtatat | 2728 | atatacatatctacacctg | 3626 |
| ggcctcctggatcatccga | 861 | tcggatgatccaggaggcc | 1795 | aggtgtagatatgtatata | 2729 | tatatacatatctacacct | 3627 |
| gcctcctggatcatccgag | 862 | ctcggatgatccaggaggc | 1796 | ggtgtagatatgtatatac | 2730 | gtatatacatatctacacc | 3628 |
| cctcctggatcatccgagg | 863 | cctcggatgatccaggagg | 1797 | gtgtagatatgtatataca | 2731 | tgtatatacatatctacac | 3629 |
| ctcctggatcatccgaggg | 864 | ccctcggatgatccaggag | 1798 | tgtagatatgtatatacaa | 2732 | ttgtatatacatatctaca | 3630 |
| tcctggatcatccgagggg | 865 | cccctcggatgatccagga | 1799 | gtagatatgtatatacaaa | 2733 | tttgtatatacatatctac | 3631 |
| cctggatcatccgaggggg | 866 | ccccctcggatgatccagg | 1800 | tagatatgtatatacaaaa | 2734 | ttttgtatatacatatcta | 3632 |
| ctggatcatccgagggggc | 867 | gccccctcggatgatccag | 1801 | agatatgtatatacaaaaa | 2735 | tttttgtatatacatatct | 3633 |
| tggatcatccgagggggca | 868 | tgccccctcggatgatcca | 1802 | gatatgtatatacaaaaag | 2736 | ctttttgtatatacatatc | 3634 |
| ggatcatccgagggggcac | 869 | gtgccccctcggatgatcc | 1803 | atatgtatatacaaaaaga | 2737 | tctttttgtatatacatat | 3635 |
| gatcatccgagggggcacg | 870 | cgtgccccctcggatgatc | 1804 | tatgtatatacaaaaagat | 2738 | atctttttgtatatacata | 3636 |
| atcatccgagggggcacgg | 871 | ccgtgccccctcggatgat | 1805 | atgtatatacaaaaagatg | 2739 | catctttttgtatatacat | 3637 |
| tcatccgagggggcacgga | 872 | tccgtgccccctcggatga | 1806 | tgtatatacaaaaagatgt | 2740 | acatctttttgtatataca | 3638 |
| catccgagggggcacggaa | 873 | ttccgtgccccctcggatg | 1807 | gtatatacaaaaagatgta | 2741 | tacatctttttgtatatac | 3639 |
| atccgagggggcacggaag | 874 | cttccgtgccccctcggat | 1808 | tatatacaaaaagatgtac | 2742 | gtacatctttttgtatata | 3640 |
| tccgagggggcacggaagc | 875 | gcttccgtgccccctcgga | 1809 | atatacaaaaagatgtacg | 2743 | cgtacatctttttgtatat | 3641 |
| ccgagggggcacggaagcc | 876 | ggcttccgtgccccctcgg | 1810 | tatacaaaaagatgtacgg | 2744 | ccgtacatctttttgtata | 3642 |
| cgagggggcacggaagccg | 877 | cggcttccgtgccccctcg | 1811 | atacaaaaagatgtacggt | 2745 | accgtacatctttttgtat | 3643 |
| gagggggcacggaagccga | 878 | tcggcttccgtgccccctc | 1812 | tacaaaaagatgtacggtc | 2746 | gaccgtacatctttttgta | 3644 |
| agggggcacggaagccgac | 879 | gtcggcttccgtgccccct | 1813 | acaaaaagatgtacggtct | 2747 | agaccgtacatctttttgt | 3645 |
| gggggcacggaagccgact | 880 | agtcggcttccgtgccccc | 1814 | caaaaagatgtacggtctg | 2748 | cagaccgtacatctttttg | 3646 |
| ggggcacggaagccgacta | 881 | tagtcggcttccgtgcccc | 1815 | aaaaagatgtacggtctgg | 2749 | ccagaccgtacatcttttt | 3647 |
| gggcacggaagccgactac | 882 | gtagtcggcttccgtgccc | 1816 | aaaagatgtacggtctggc | 2750 | gccagaccgtacatctttt | 3648 |
| ggcacggaagccgactacc | 883 | ggtagtcggcttccgtgcc | 1817 | aaagatgtacggtctggcc | 2751 | ggccagaccgtacatcttt | 3649 |
| gcacggaagccgactacca | 884 | tggtagtcggcttccgtgc | 1818 | aagatgtacggtctggcca | 2752 | tggccagaccgtacatctt | 3650 |
| cacggaagccgactaccag | 885 | ctggtagtcggcttccgtg | 1819 | agatgtacggtctggccaa | 2753 | ttggccagaccgtacatct | 3651 |
| acggaagccgactaccagc | 886 | gctggtagtcggcttccgt | 1820 | gatgtacggtctggccaaa | 2754 | tttggccagaccgtacatc | 3652 |
| cggaagccgactaccagct | 887 | agctggtagtcggcttccg | 1821 | atgtacggtctggccaaac | 2755 | gtttggccagaccgtacat | 3653 |
| ggaagccgactaccagctg | 888 | cagctggtagtcggcttcc | 1822 | tgtacggtctggccaaacc | 2756 | ggtttggccagaccgtaca | 3654 |
| gaagccgactaccagctgc | 889 | gcagctggtagtcggcttc | 1823 | gtacggtctggccaaacca | 2757 | tggtttggccagaccgtac | 3655 |
| aagccgactaccagctgca | 890 | tgcagctggtagtcggctt | 1824 | tacggtctggccaaaccac | 2758 | gtggtttggccagaccgta | 3656 |
| agccgactaccagctgcac | 891 | gtgcagctggtagtcggct | 1825 | acggtctggccaaaccacc | 2759 | ggtggtttggccagaccgt | 3657 |
| gccgactaccagctgcaca | 892 | tgtgcagctggtagtcggc | 1826 | cggtctggccaaaccacct | 2760 | aggtggtttggccagaccg | 3658 |
| ccgactaccagctgcacaa | 893 | ttgtgcagctggtagtcgg | 1827 | ggtctggccaaaccacctt | 2761 | aaggtggtttggccagacc | 3659 |
| cgactaccagctgcacaac | 894 | gttgtgcagctggtagtcg | 1828 | gtctggccaaaccaccttc | 2762 | gaaggtggtttggccagac | 3660 |
| gactaccagctgcacaacg | 895 | cgttgtgcagctggtagtc | 1829 | tctggccaaaccaccttcc | 2763 | ggaaggtggtttggccaga | 3661 |
| actaccagctgcacaacgt | 896 | acgttgtgcagctggtagt | 1830 | ctggccaaaccaccttccc | 2764 | gggaaggtggtttggccag | 3662 |
| ctaccagctgcacaacgtc | 897 | gacgttgtgcagctggtag | 1831 | tggccaaaccaccttccca | 2765 | tgggaaggtggtttggcca | 3663 |
| taccagctgcacaacgtcc | 898 | ggacgttgtgcagctggta | 1832 | ggccaaaccaccttcccag | 2766 | ctgggaaggtggtttggcc | 3664 |
| accagctgcacaacgtcca | 899 | tggacgttgtgcagctggt | 1833 | gccaaaccaccttcccagc | 2767 | gctgggaaggtggtttggc | 3665 |
| ccagctgcacaacgtccag | 900 | ctggacgttgtgcagctgg | 1834 | ccaaaccaccttcccagcc | 2768 | ggctgggaaggtggtttgg | 3666 |
| cagctgcacaacgtccagg | 901 | cctggacgttgtgcagctg | 1835 | caaaccaccttcccagcct | 2769 | aggctgggaaggtggtttg | 3667 |
| agctgcacaacgtccaggt | 902 | acctggacgttgtgcagct | 1836 | aaaccaccttcccagcctt | 2770 | aaggctgggaaggtggttt | 3668 |
| gctgcacaacgtccaggtg | 903 | cacctggacgttgtgcagc | 1837 | aaccaccttcccagccttt | 2771 | aaaggctgggaaggtggtt | 3669 |
| ctgcacaacgtccaggtga | 904 | tcacctggacgttgtgcag | 1838 | accaccttcccagccttta | 2772 | taaaggctgggaaggtggt | 3670 |
| tgcacaacgtccaggtgat | 905 | atcacctggacgttgtgca | 1839 | ccaccttcccagcctttat | 2773 | ataaaggctgggaaggtgg | 3671 |
| gcacaacgtccaggtgatc | 906 | gatcacctggacgttgtgc | 1840 | caccttcccagcctttatg | 2774 | cataaaggctgggaaggtg | 3672 |
| cacaacgtccaggtgatct | 907 | agatcacctggacgttgtg | 1841 | accttcccagcctttatgc | 2775 | gcataaaggctgggaaggt | 3673 |
| acaacgtccaggtgatctg | 908 | cagatcacctggacgttgt | 1842 | ccttcccagcctttatgca | 2776 | tgcataaaggctgggaagg | 3674 |
| caacgtccaggtgatctgc | 909 | gcagatcacctggacgttg | 1843 | cttcccagcctttatgcaa | 2777 | ttgcataaaggctgggaag | 3675 |
| aacgtccaggtgatctgcc | 910 | ggcagatcacctggacgtt | 1844 | ttcccagcctttatgcaaa | 2778 | tttgcataaaggctgggaa | 3676 |
| acgtccaggtgatctgcca | 911 | tggcagatcacctggacgt | 1845 | tcccagcctttatgcaaaa | 2779 | ttttgcataaaggctggga | 3677 |
| cgtccaggtgatctgccac | 912 | gtggcagatcacctggacg | 1846 | cccagcctttatgcaaaaa | 2780 | tttttgcataaaggctggg | 3678 |
| gtccaggtgatctgccaca | 913 | tgtggcagatcacctggac | 1847 | ccagcctttatgcaaaaaa | 2781 | ttttttgcataaaggctgg | 3679 |
| tccaggtgatctgccacac | 914 | gtgtggcagatcacctgga | 1848 | cagcctttatgcaaaaaaa | 2782 | tttttttgcataaaggctg | 3680 |
| ccaggtgatctgccacaca | 915 | tgtgtggcagatcacctgg | 1849 | agcctttatgcaaaaaaag | 2783 | ctttttttgcataaaggct | 3681 |
| caggtgatctgccacacag | 916 | ctgtgtggcagatcacctg | 1850 | gcctttatgcaaaaaaagg | 2784 | cctttttttgcataaaggc | 3682 |
| aggtgatctgccacacaga | 917 | tctgtgtggcagatcacct | 1851 | cctttatgcaaaaaaaggg | 2785 | ccctttttttgcataaagg | 3683 |
| ggtgatctgccacacagag | 918 | ctctgtgtggcagatcacc | 1852 | ctttatgcaaaaaaagggg | 2786 | cccctttttttgcataaag | 3684 |
| gtgatctgccacacagagg | 919 | cctctgtgtggcagatcac | 1853 | tttatgcaaaaaaagggga | 2787 | tcccctttttttgcataaa | 3685 |
| tgatctgccacacagaggc | 920 | gcctctgtgtggcagatca | 1854 | ttatgcaaaaaaaggggag | 2788 | ctcccctttttttgcataa | 3686 |
| gatctgccacacagaggcg | 921 | cgcctctgtgtggcagatc | 1855 | tatgcaaaaaaaggggaga | 2789 | tctcccctttttttgcata | 3687 |
| atctgccacacagaggcgg | 922 | ccgcctctgtgtggcagat | 1856 | atgcaaaaaaaggggagaa | 2790 | ttctcccctttttttgcat | 3688 |
| tctgccacacagaggcggt | 923 | accgcctctgtgtggcaga | 1857 | tgcaaaaaaaggggagaat | 2791 | attctcccctttttttgca | 3689 |
| ctgccacacagaggcggtg | 924 | caccgcctctgtgtggcag | 1858 | gcaaaaaaaggggagaatc | 2792 | gattctcccctttttttgc | 3690 |
| tgccacacagaggcggtgg | 925 | ccaccgcctctgtgtggca | 1859 | caaaaaaaggggagaatca | 2793 | tgattctcccctttttttg | 3691 |
| gccacacagaggcggtggc | 926 | gccaccgcctctgtgtggc | 1860 | aaaaaaaggggagaatcaa | 2794 | ttgattctccccttttttt | 3692 |
| ccacacagaggcggtggcc | 927 | ggccaccgcctctgtgtgg | 1861 | aaaaaaggggagaatcaaa | 2795 | tttgattctcccctttttt | 3693 |
| cacacagaggcggtggccg | 928 | cggccaccgcctctgtgtg | 1862 | aaaaaggggagaatcaaag | 2796 | ctttgattctccccttttt | 3694 |
| acacagaggcggtggccga | 929 | tcggccaccgcctctgtgt | 1863 | aaaaggggagaatcaaagc | 2797 | gctttgattctcccctttt | 3695 |
| cacagaggcggtggccgag | 930 | ctcggccaccgcctctgtg | 1864 | aaaggggagaatcaaagct | 2798 | agctttgattctccccttt | 3696 |
| acagaggcggtggccgaga | 931 | tctcggccaccgcctctgt | 1865 | aaggggagaatcaaagctt | 2799 | aagctttgattctcccctt | 3697 |
| cagaggcggtggccgagaa | 932 | ttctcggccaccgcctctg | 1866 | aggggagaatcaaagcttt | 2800 | aaagctttgattctcccct | 3698 |
| agaggcggtggccgagaag | 933 | cttctcggccaccgcctct | 1867 | ggggagaatcaaagctttc | 2801 | gaaagctttgattctcccc | 3699 |
| gaggcggtggccgagaagc | 934 | gcttctcggccaccgcctc | 1868 | gggagaatcaaagctttca | 2802 | tgaaagctttgattctccc | 3700 |
| aggcggtggccgagaagct | 935 | agcttctcggccaccgcct | 1869 | ggagaatcaaagctttcat | 2803 | atgaaagctttgattctcc | 3701 |
| ggcggtggccgagaagctc | 936 | gagcttctcggccaccgcc | 1870 | gagaatcaaagctttcatt | 2804 | aatgaaagctttgattctc | 3702 |
| gcggtggccgagaagctcg | 937 | cgagcttctcggccaccgc | 1871 | agaatcaaagctttcattt | 2805 | aaatgaaagctttgattct | 3703 |
| cggtggccgagaagctcgg | 938 | ccgagcttctcggccaccg | 1872 | gaatcaaagctttcatttc | 2806 | gaaatgaaagctttgattc | 3704 |
| ggtggccgagaagctcggc | 939 | gccgagcttctcggccacc | 1873 | aatcaaagctttcatttca | 2807 | tgaaatgaaagctttgatt | 3705 |
| gtggccgagaagctcggcc | 940 | ggccgagcttctcggccac | 1874 | atcaaagctttcatttcag | 2808 | ctgaaatgaaagctttgat | 3706 |
| tggccgagaagctcggcca | 941 | tggccgagcttctcggcca | 1875 | tcaaagctttcatttcaga | 2809 | tctgaaatgaaagctttga | 3707 |
| ggccgagaagctcggccag | 942 | ctggccgagcttctcggcc | 1876 | caaagctttcatttcagaa | 2810 | ttctgaaatgaaagctttg | 3708 |
| gccgagaagctcggccagc | 943 | gctggccgagcttctcggc | 1877 | aaagctttcatttcagaaa | 2811 | tttctgaaatgaaagcttt | 3709 |
| ccgagaagctcggccagca | 944 | tgctggccgagcttctcgg | 1878 | aagctttcatttcagaaat | 2812 | atttctgaaatgaaagctt | 3710 |
| cgagaagctcggccagcag | 945 | ctgctggccgagcttctcg | 1879 | agctttcatttcagaaatg | 2813 | catttctgaaatgaaagct | 3711 |
| gagaagctcggccagcagg | 946 | cctgctggccgagcttctc | 1880 | gctttcatttcagaaatgt | 2814 | acatttctgaaatgaaagc | 3712 |
| agaagctcggccagcaggt | 947 | acctgctggccgagcttct | 1881 | ctttcatttcagaaatgtt | 2815 | aacatttctgaaatgaaag | 3713 |
| gaagctcggccagcaggtg | 948 | cacctgctggccgagcttc | 1882 | tttcatttcagaaatgttg | 2816 | caacatttctgaaatgaaa | 3714 |
| aagctcggccagcaggtga | 949 | tcacctgctggccgagctt | 1883 | ttcatttcagaaatgttgc | 2817 | gcaacatttctgaaatgaa | 3715 |
| agctcggccagcaggtgaa | 950 | ttcacctgctggccgagct | 1884 | tcatttcagaaatgttgcg | 2818 | cgcaacatttctgaaatga | 3716 |
| gctcggccagcaggtgaac | 951 | gttcacctgctggccgagc | 1885 | catttcagaaatgttgcgt | 2819 | acgcaacatttctgaaatg | 3717 |
| ctcggccagcaggtgaacc | 952 | ggttcacctgctggccgag | 1886 | atttcagaaatgttgcgtg | 2820 | cacgcaacatttctgaaat | 3718 |
| tcggccagcaggtgaaccg | 953 | cggttcacctgctggccga | 1887 | tttcagaaatgttgcgtgg | 2821 | ccacgcaacatttctgaaa | 3719 |
| cggccagcaggtgaaccgc | 954 | gcggttcacctgctggccg | 1888 | ttcagaaatgttgcgtgga | 2822 | tccacgcaacatttctgaa | 3720 |
| ggccagcaggtgaaccgca | 955 | tgcggttcacctgctggcc | 1889 | tcagaaatgttgcgtggaa | 2823 | ttccacgcaacatttctga | 3721 |
| gccagcaggtgaaccgcac | 956 | gtgcggttcacctgctggc | 1890 | cagaaatgttgcgtggaaa | 2824 | tttccacgcaacatttctg | 3722 |
| ccagcaggtgaaccgcaca | 957 | tgtgcggttcacctgctgg | 1891 | agaaatgttgcgtggaaaa | 2825 | ttttccacgcaacatttct | 3723 |
| cagcaggtgaaccgcacat | 958 | atgtgcggttcacctgctg | 1892 | gaaatgttgcgtggaaaag | 2826 | cttttccacgcaacatttc | 3724 |
| agcaggtgaaccgcacatg | 959 | catgtgcggttcacctgct | 1893 | aaatgttgcgtggaaaagt | 2827 | acttttccacgcaacattt | 3725 |
| gcaggtgaaccgcacatgc | 960 | gcatgtgcggttcacctgc | 1894 | aatgttgcgtggaaaagta | 2828 | tacttttccacgcaacatt | 3726 |
| caggtgaaccgcacatgcc | 961 | ggcatgtgcggttcacctg | 1895 | atgttgcgtggaaaagtat | 2829 | atacttttccacgcaacat | 3727 |
| aggtgaaccgcacatgccc | 962 | gggcatgtgcggttcacct | 1896 | tgttgcgtggaaaagtatc | 2830 | gatacttttccacgcaaca | 3728 |
| ggtgaaccgcacatgcccg | 963 | cgggcatgtgcggttcacc | 1897 | gttgcgtggaaaagtatct | 2831 | agatacttttccacgcaac | 3729 |
| gtgaaccgcacatgcccgg | 964 | ccgggcatgtgcggttcac | 1898 | ttgcgtggaaaagtatctg | 2832 | cagatacttttccacgcaa | 3730 |
| tgaaccgcacatgcccggg | 965 | cccgggcatgtgcggttca | 1899 | tgcgtggaaaagtatctgt | 2833 | acagatacttttccacgca | 3731 |
| gaaccgcacatgcccgggc | 966 | gcccgggcatgtgcggttc | 1900 | gcgtggaaaagtatctgta | 2834 | tacagatacttttccacgc | 3732 |
| aaccgcacatgcccgggct | 967 | agcccgggcatgtgcggtt | 1901 | cgtggaaaagtatctgtaa | 2835 | ttacagatacttttccacg | 3733 |
| accgcacatgcccgggctt | 968 | aagcccgggcatgtgcggt | 1902 | gtggaaaagtatctgtaat | 2836 | attacagatacttttccac | 3734 |
| ccgcacatgcccgggcttc | 969 | gaagcccgggcatgtgcgg | 1903 | tggaaaagtatctgtaatt | 2837 | aattacagatacttttcca | 3735 |
| cgcacatgcccgggcttcc | 970 | ggaagcccgggcatgtgcg | 1904 | ggaaaagtatctgtaatta | 2838 | taattacagatacttttcc | 3736 |
| gcacatgcccgggcttcct | 971 | aggaagcccgggcatgtgc | 1905 | gaaaagtatctgtaattaa | 2839 | ttaattacagatacttttc | 3737 |
| cacatgcccgggcttcctc | 972 | gaggaagcccgggcatgtg | 1906 | aaaagtatctgtaattaaa | 2840 | tttaattacagatactttt | 3738 |
| acatgcccgggcttcctcg | 973 | cgaggaagcccgggcatgt | 1907 | aaagtatctgtaattaaag | 2841 | ctttaattacagatacttt | 3739 |
| catgcccgggcttcctcgc | 974 | gcgaggaagcccgggcatg | 1908 | aagtatctgtaattaaagt | 2842 | actttaattacagatactt | 3740 |
| atgcccgggcttcctcgca | 975 | tgcgaggaagcccgggcat | 1909 | agtatctgtaattaaagtt | 2843 | aactttaattacagatact | 3741 |
| tgcccgggcttcctcgcag | 976 | ctgcgaggaagcccgggca | 1910 | gtatctgtaattaaagttt | 2844 | aaactttaattacagatac | 3742 |
| gcccgggcttcctcgcaga | 977 | tctgcgaggaagcccgggc | 1911 | tatctgtaattaaagtttc | 2845 | gaaactttaattacagata | 3743 |
| cccgggcttcctcgcagac | 978 | gtctgcgaggaagcccggg | 1912 | atctgtaattaaagtttcg | 2846 | cgaaactttaattacagat | 3744 |
| ccgggcttcctcgcagacg | 979 | cgtctgcgaggaagcccgg | 1913 | tctgtaattaaagtttcga | 2847 | tcgaaactttaattacaga | 3745 |
| cgggcttcctcgcagacgg | 980 | ccgtctgcgaggaagcccg | 1914 | ctgtaattaaagtttcgaa | 2848 | ttcgaaactttaattacag | 3746 |
| gggcttcctcgcagacggg | 981 | cccgtctgcgaggaagccc | 1915 | tgtaattaaagtttcgaag | 2849 | cttcgaaactttaattaca | 3747 |
| ggcttcctcgcagacgggg | 982 | ccccgtctgcgaggaagcc | 1916 | gtaattaaagtttcgaagt | 2850 | acttcgaaactttaattac | 3748 |
| gcttcctcgcagacggggg | 983 | cccccgtctgcgaggaagc | 1917 | taattaaagtttcgaagta | 2851 | tacttcgaaactttaatta | 3749 |
| cttcctcgcagacgggggt | 984 | acccccgtctgcgaggaag | 1918 | aattaaagtttcgaagtaa | 2852 | ttacttcgaaactttaatt | 3750 |
| ttcctcgcagacgggggtc | 985 | gacccccgtctgcgaggaa | 1919 | attaaagtttcgaagtaat | 2853 | attacttcgaaactttaat | 3751 |
| tcctcgcagacgggggtcc | 986 | ggacccccgtctgcgagga | 1920 | ttaaagtttcgaagtaatt | 2854 | aattacttcgaaactttaa | 3752 |
| cctcgcagacgggggtccc | 987 | gggacccccgtctgcgagg | 1921 | taaagtttcgaagtaattt | 2855 | aaattacttcgaaacttta | 3753 |
| ctcgcagacgggggtccct | 988 | agggacccccgtctgcgag | 1922 | aaagtttcgaagtaattta | 2856 | taaattacttcgaaacttt | 3754 |
| tcgcagacgggggtccctg | 989 | cagggacccccgtctgcga | 1923 | aagtttcgaagtaatttaa | 2857 | ttaaattacttcgaaactt | 3755 |
| cgcagacgggggtccctgg | 990 | ccagggacccccgtctgcg | 1924 | agtttcgaagtaatttaac | 2858 | gttaaattacttcgaaact | 3756 |
| gcagacgggggtccctggg | 991 | cccagggacccccgtctgc | 1925 | gtttcgaagtaatttaacc | 2859 | ggttaaattacttcgaaac | 3757 |
| cagacgggggtccctgggt | 992 | acccagggacccccgtctg | 1926 | tttcgaagtaatttaacct | 2860 | aggttaaattacttcgaaa | 3758 |
| agacgggggtccctgggtg | 993 | cacccagggacccccgtct | 1927 | ttcgaagtaatttaaccta | 2861 | taggttaaattacttcgaa | 3759 |
| gacgggggtccctgggtgc | 994 | gcacccagggacccccgtc | 1928 | tcgaagtaatttaacctaa | 2862 | ttaggttaaattacttcga | 3760 |
| acgggggtccctgggtgca | 995 | tgcacccagggacccccgt | 1929 | cgaagtaatttaacctaaa | 2863 | tttaggttaaattacttcg | 3761 |
| cgggggtccctgggtgcag | 996 | ctgcacccagggacccccg | 1930 | gaagtaatttaacctaaaa | 2864 | ttttaggttaaattacttc | 3762 |
| gggggtccctgggtgcagg | 997 | cctgcacccagggaccccc | 1931 | aagtaatttaacctaaaaa | 2865 | tttttaggttaaattactt | 3763 |
| ggggtccctgggtgcagga | 998 | tcctgcacccagggacccc | 1932 | agtaatttaacctaaaaaa | 2866 | ttttttaggttaaattact | 3764 |
| gggtccctgggtgcaggac | 999 | gtcctgcacccagggaccc | 1933 | gtaatttaacctaaaaaaa | 2867 | tttttttaggttaaattac | 3765 |
| ggtccctgggtgcaggacg | 1000 | cgtcctgcacccagggacc | 1934 | taatttaacctaaaaaaaa | 2868 | ttttttttaggttaaatta | 3766 |
| gtccctgggtgcaggacgt | 1001 | acgtcctgcacccagggac | 1935 | aatttaacctaaaaaaaaa | 2869 | tttttttttaggttaaatt | 3767 |
| tccctgggtgcaggacgtg | 1002 | cacgtcctgcacccaggga | 1936 | atttaacctaaaaaaaaaa | 2870 | ttttttttttaggttaaat | 3768 |
| ccctgggtgcaggacgtgg | 1003 | ccacgtcctgcacccaggg | 1937 | tttaacctaaaaaaaaaaa | 2871 | tttttttttttaggttaaa | 3769 |
| cctgggtgcaggacgtggc | 1004 | gccacgtcctgcacccagg | 1938 | ttaacctaaaaaaaaaaaa | 2872 | ttttttttttttaggttaa | 3770 |
| ctgggtgcaggacgtggcc | 1005 | ggccacgtcctgcacccag | 1939 | taacctaaaaaaaaaaaaa | 2873 | tttttttttttttaggtta | 3771 |
| tgggtgcaggacgtggcct | 1006 | aggccacgtcctgcaccca | 1940 | aacctaaaaaaaaaaaaaa | 2874 | ttttttttttttttaggtt | 3772 |
| gggtgcaggacgtggccta | 1007 | taggccacgtcctgcaccc | 1941 | acctaaaaaaaaaaaaaaa | 2875 | tttttttttttttttaggt | 3773 |
| ggtgcaggacgtggcctat | 1008 | ataggccacgtcctgcacc | 1942 | cctaaaaaaaaaaaaaaaa | 2876 | ttttttttttttttttagg | 3774 |
| gtgcaggacgtggcctatg | 1009 | cataggccacgtcctgcac | 1943 | ctaaaaaaaaaaaaaaaaa | 2877 | tttttttttttttttttag | 3775 |
| tgcaggacgtggcctatga | 1010 | tcataggccacgtcctgca | 1944 | taaaaaaaaaaaaaaaaaa | 2878 | tttttttttttttttttta | 3776 |
| gcaggacgtggcctatgac | 1011 | gtcataggccacgtcctgc | 1945 | gaacggctgtgagtgcacc | 1044 | ggtgcactcacagccgttc | 1978 |
| caggacgtggcctatgacc | 1012 | ggtcataggccacgtcctg | 1946 | aacggctgtgagtgcacca | 1045 | tggtgcactcacagccgtt | 1979 |
| aggacgtggcctatgacct | 1013 | aggtcataggccacgtcct | 1947 | | | | |
| ggacgtggcctatgacctc | 1014 | gaggtcataggccacgtcc | 1948 | | | | |
| gacgtggcctatgacctct | 1015 | agaggtcataggccacgtc | 1949 | | | | |
| acgtggcctatgacctctg | 1016 | cagaggtcataggccacgt | 1950 | | | | |
| cgtggcctatgacctctgg | 1017 | ccagaggtcataggccacg | 1951 | | | | |
| gtggcctatgacctctggc | 1018 | gccagaggtcataggccac | 1952 | | | | |
| tggcctatgacctctggcg | 1019 | cgccagaggtcataggcca | 1953 | | | | |
| ggcctatgacctctggcga | 1020 | tcgccagaggtcataggcc | 1954 | | | | |
| gcctatgacctctggcgag | 1021 | ctcgccagaggtcataggc | 1955 | | | | |
| cctatgacctctggcgaga | 1022 | tctcgccagaggtcatagg | 1956 | | | | |
| ctatgacctctggcgagag | 1023 | ctctcgccagaggtcatag | 1957 | | | | |
| tatgacctctggcgagagg | 1024 | cctctcgccagaggtcata | 1958 | | | | |
| atgacctctggcgagagga | 1025 | tcctctcgccagaggtcat | 1959 | | | | |
| tgacctctggcgagaggag | 1026 | ctcctctcgccagaggtca | 1960 | | | | |
| gacctctggcgagaggaga | 1027 | tctcctctcgccagaggtc | 1961 | | | | |
| acctctggcgagaggagaa | 1028 | ttctcctctcgccagaggt | 1962 | | | | |
| cctctggcgagaggagaac | 1029 | gttctcctctcgccagagg | 1963 | | | | |
| ctctggcgagaggagaacg | 1030 | cgttctcctctcgccagag | 1964 | | | | |
| tctggcgagaggagaacgg | 1031 | ccgttctcctctcgccaga | 1965 | | | | |
| ctggcgagaggagaacggc | 1032 | gccgttctcctctcgccag | 1966 | | | | |
| tggcgagaggagaacggct | 1033 | agccgttctcctctcgcca | 1967 | | | | |
| ggcgagaggagaacggctg | 1034 | cagccgttctcctctcgcc | 1968 | | | | |
| gcgagaggagaacggctgt | 1035 | acagccgttctcctctcgc | 1969 | | | | |
| cgagaggagaacggctgtg | 1036 | cacagccgttctcctctcg | 1970 | | | | |
| gagaggagaacggctgtga | 1037 | tcacagccgttctcctctc | 1971 | | | | |
| agaggagaacggctgtgag | 1038 | ctcacagccgttctcctct | 1972 | | | | |
| gaggagaacggctgtgagt | 1039 | actcacagccgttctcctc | 1973 | | | | |
| aggagaacggctgtgagtg | 1040 | cactcacagccgttctcct | 1974 | | | | |
| ggagaacggctgtgagtgc | 1041 | gcactcacagccgttctcc | 1975 | | | | |
| gagaacggctgtgagtgca | 1042 | tgcactcacagccgttctc | 1976 | | | | |
| agaacggctgtgagtgcac | 1043 | gtgcactcacagccgttct | 1977 | | | | |

TABLE 2
List of siRNAs directed to mouse APCDD1.

| | | | | | | | SEQ |
|---|---|---|---|---|---|---|---|
| | SEQ ID | | SEQ ID | | SEQ ID | | ID |
| Sense (5′-3′) | NO: | Anti-sense (5′-3′) | NO: | Sense (5′-3′) | NO: | Anti-sense (5′-3′) | NO: |
| agcggccactgtacctctg | 3777 | cagaggtacagtggccgct | 5168 | tctcatctaaggtcatggg | 6559 | cccatgaccttagatgaga | 7949 |
| gcggccactgtacctctga | 3778 | tcagaggtacagtggccgc | 5169 | ctcatctaaggtcatgggt | 6560 | acccatgaccttagatgag | 7950 |
| cggccactgtacctctgag | 3779 | ctcagaggtacagtggccg | 5170 | tcatctaaggtcatgggtg | 6561 | cacccatgaccttagatga | 7951 |
| ggccactgtacctctgagc | 3780 | gctcagaggtacagtggcc | 5171 | catctaaggtcatgggtgg | 6562 | ccacccatgaccttagatg | 7952 |
| gccactgtacctctgagct | 3781 | agctcagaggtacagtggc | 5172 | atctaaggtcatgggtggc | 6563 | gccacccatgaccttagat | 7953 |
| ccactgtacctctgagctg | 3782 | cagctcagaggtacagtgg | 5173 | tctaaggtcatgggtggca | 6564 | tgccacccatgaccttaga | 7954 |
| cactgtacctctgagctgt | 3783 | acagctcagaggtacagtg | 5174 | ctaaggtcatgggtggcac | 6565 | gtgccacccatgaccttag | 7955 |
| actgtacctctgagctgtg | 3784 | cacagctcagaggtacagt | 5175 | taaggtcatgggtggcacg | 6566 | cgtgccacccatgacctta | 7956 |
| ctgtacctctgagctgtgc | 3785 | gcacagctcagaggtacag | 5176 | aaggtcatgggtggcacgg | 6567 | ccgtgccacccatgacctt | 7957 |
| tgtacctctgagctgtgca | 3786 | tgcacagctcagaggtaca | 5177 | aggtcatgggtggcacgga | 6568 | tccgtgccacccatgacct | 7958 |
| gtacctctgagctgtgcac | 3787 | gtgcacagctcagaggtac | 5178 | ggtcatgggtggcacggag | 6569 | ctccgtgccacccatgacc | 7959 |
| tacctctgagctgtgcacg | 3788 | cgtgcacagctcagaggta | 5179 | gtcatgggtggcacggagt | 6570 | actccgtgccacccatgac | 7960 |
| acctctgagctgtgcacgc | 3789 | gcgtgcacagctcagaggt | 5180 | tcatgggtggcacggagtt | 6571 | aactccgtgccacccatga | 7961 |
| cctctgagctgtgcacgcc | 3790 | ggcgtgcacagctcagagg | 5181 | catgggtggcacggagttt | 6572 | aaactccgtgccacccatg | 7962 |
| ctctgagctgtgcacgccg | 3791 | cggcgtgcacagctcagag | 5182 | atgggtggcacggagtttg | 6573 | caaactccgtgccacccat | 7963 |
| tctgagctgtgcacgccgc | 3792 | gcggcgtgcacagctcaga | 5183 | tgggtggcacggagtttgt | 6574 | acaaactccgtgccaccca | 7964 |
| ctgagctgtgcacgccgcg | 3793 | cgcggcgtgcacagctcag | 5184 | gggtggcacggagtttgtg | 6575 | cacaaactccgtgccaccc | 7965 |
| tgagctgtgcacgccgcgg | 3794 | ccgcggcgtgcacagctca | 5185 | ggtggcacggagtttgtgt | 6576 | acacaaactccgtgccacc | 7966 |
| gagctgtgcacgccgcggc | 3795 | gccgcggcgtgcacagctc | 5186 | gtggcacggagtttgtgtt | 6577 | aacacaaactccgtgccac | 7967 |
| agctgtgcacgccgcggcc | 3796 | ggccgcggcgtgcacagct | 5187 | tggcacggagtttgtgttc | 6578 | gaacacaaactccgtgcca | 7968 |
| gctgtgcacgccgcggccg | 3797 | cggccgcggcgtgcacagc | 5188 | ggcacggagtttgtgttca | 6579 | tgaacacaaactccgtgcc | 7969 |
| ctgtgcacgccgcggccgg | 3798 | ccggccgcggcgtgcacag | 5189 | gcacggagtttgtgttcaa | 6580 | ttgaacacaaactccgtgc | 7970 |
| tgtgcacgccgcggccggg | 3799 | cccggccgcggcgtgcaca | 5190 | cacggagtttgtgttcaaa | 6581 | tttgaacacaaactccgtg | 7971 |
| gtgcacgccgcggccgggg | 3800 | ccccggccgcggcgtgcac | 5191 | acggagtttgtgttcaaag | 6582 | ctttgaacacaaactccgt | 7972 |
| tgcacgccgcggccggggc | 3801 | gccccggccgcggcgtgca | 5192 | cggagtttgtgttcaaagt | 6583 | actttgaacacaaactccg | 7973 |
| gcacgccgcggccggggcg | 3802 | cgccccggccgcggcgtgc | 5193 | ggagtttgtgttcaaagtg | 6584 | cactttgaacacaaactcc | 7974 |
| cacgccgcggccggggcgg | 3803 | ccgccccggccgcggcgtg | 5194 | gagtttgtgttcaaagtga | 6585 | tcactttgaacacaaactc | 7975 |
| acgccgcggccggggcggg | 3804 | cccgccccggccgcggcgt | 5195 | agtttgtgttcaaagtgaa | 6586 | ttcactttgaacacaaact | 7976 |
| cgccgcggccggggcgggc | 3805 | gcccgccccggccgcggcg | 5196 | gtttgtgttcaaagtgaat | 6587 | attcactttgaacacaaac | 7977 |
| gccgcggccggggcgggcc | 3806 | ggcccgccccggccgcggc | 5197 | tttgtgttcaaagtgaatc | 6588 | gattcactttgaacacaaa | 7978 |
| ccgcggccggggcgggcct | 3807 | aggcccgccccggccgcgg | 5198 | ttgtgttcaaagtgaatca | 6589 | tgattcactttgaacacaa | 7979 |
| cgcggccggggcgggcctc | 3808 | gaggcccgccccggccgcg | 5199 | tgtgttcaaagtgaatcac | 6590 | gtgattcactttgaacaca | 7980 |
| gcggccggggcgggcctcg | 3809 | cgaggcccgccccggccgc | 5200 | gtgttcaaagtgaatcaca | 6591 | tgtgattcactttgaacac | 7981 |
| cggccggggcgggcctcgg | 3810 | ccgaggcccgccccggccg | 5201 | tgttcaaagtgaatcacat | 6592 | atgtgattcactttgaaca | 7982 |
| ggccggggcgggcctcggg | 3811 | cccgaggcccgccccggcc | 5202 | gttcaaagtgaatcacatg | 6593 | catgtgattcactttgaac | 7983 |
| gccggggcgggcctcggga | 3812 | tcccgaggcccgccccggc | 5203 | ttcaaagtgaatcacatga | 6594 | tcatgtgattcactttgaa | 7984 |
| ccggggcgggcctcgggac | 3813 | gtcccgaggcccgccccgg | 5204 | tcaaagtgaatcacatgaa | 6595 | ttcatgtgattcactttga | 7985 |
| cggggcgggcctcgggact | 3814 | agtcccgaggcccgccccg | 5205 | caaagtgaatcacatgaag | 6596 | cttcatgtgattcactttg | 7986 |
| ggggcgggcctcgggactg | 3815 | cagtcccgaggcccgcccc | 5206 | aaagtgaatcacatgaagg | 6597 | ccttcatgtgattcacttt | 7987 |
| gggcgggcctcgggactgg | 3816 | ccagtcccgaggcccgccc | 5207 | aagtgaatcacatgaaggt | 6598 | accttcatgtgattcactt | 7988 |
| ggcgggcctcgggactggg | 3817 | cccagtcccgaggcccgcc | 5208 | agtgaatcacatgaaggtt | 6599 | aaccttcatgtgattcact | 7989 |
| gcgggcctcgggactgggg | 3818 | ccccagtcccgaggcccgc | 5209 | gtgaatcacatgaaggtta | 6600 | taaccttcatgtgattcac | 7990 |
| cgggcctcgggactggggc | 3819 | gccccagtcccgaggcccg | 5210 | tgaatcacatgaaggttac | 6601 | gtaaccttcatgtgattca | 7991 |
| gggcctcgggactggggct | 3820 | agccccagtcccgaggccc | 5211 | gaatcacatgaaggttact | 6602 | agtaaccttcatgtgattc | 7992 |
| ggcctcgggactggggctg | 3821 | cagccccagtcccgaggcc | 5212 | aatcacatgaaggttactc | 6603 | gagtaaccttcatgtgatt | 7993 |
| gcctcgggactggggctgg | 3822 | ccagccccagtcccgaggc | 5213 | atcacatgaaggttactcc | 6604 | ggagtaaccttcatgtgat | 7994 |
| cctcgggactggggctggg | 3823 | cccagccccagtcccgagg | 5214 | tcacatgaaggttactccc | 6605 | gggagtaaccttcatgtga | 7995 |
| ctcgggactggggctggga | 3824 | tcccagccccagtcccgag | 5215 | cacatgaaggttactccca | 6606 | tgggagtaaccttcatgtg | 7996 |
| tcgggactggggctgggag | 3825 | ctcccagccccagtcccga | 5216 | acatgaaggttactcccat | 6607 | atgggagtaaccttcatgt | 7997 |
| cgggactggggctgggagc | 3826 | gctcccagccccagtcccg | 5217 | catgaaggttactcccatg | 6608 | catgggagtaaccttcatg | 7998 |
| gggactggggctgggagcc | 3827 | ggctcccagccccagtccc | 5218 | atgaaggttactcccatgg | 6609 | ccatgggagtaaccttcat | 7999 |
| ggactggggctgggagcca | 3828 | tggctcccagccccagtcc | 5219 | tgaaggttactcccatgga | 6610 | tccatgggagtaaccttca | 8000 |
| gactggggctgggagccaa | 3829 | ttggctcccagccccagtc | 5220 | gaaggttactcccatggac | 6611 | gtccatgggagtaaccttc | 8001 |
| actggggctgggagccaag | 3830 | cttggctcccagccccagt | 5221 | aaggttactcccatggacg | 6612 | cgtccatgggagtaacctt | 8002 |
| ctggggctgggagccaagg | 3831 | ccttggctcccagccccag | 5222 | aggttactcccatggacgc | 6613 | gcgtccatgggagtaacct | 8003 |
| tggggctgggagccaaggg | 3832 | cccttggctcccagcccca | 5223 | ggttactcccatggacgca | 6614 | tgcgtccatgggagtaacc | 8004 |
| ggggctgggagccaagggg | 3833 | ccccttggctcccagcccc | 5224 | gttactcccatggacgcag | 6615 | ctgcgtccatgggagtaac | 8005 |
| gggctgggagccaaggggc | 3834 | gccccttggctcccagccc | 5225 | ttactcccatggacgcagc | 6616 | gctgcgtccatgggagtaa | 8006 |
| ggctgggagccaaggggcc | 3835 | ggccccttggctcccagcc | 5226 | tactcccatggacgcagcc | 6617 | ggctgcgtccatgggagta | 8007 |
| gctgggagccaaggggccg | 3836 | cggccccttggctcccagc | 5227 | actcccatggacgcagcca | 6618 | tggctgcgtccatgggagt | 8008 |
| ctgggagccaaggggccgg | 3837 | ccggccccttggctcccag | 5228 | ctcccatggacgcagccac | 6619 | gtggctgcgtccatgggag | 8009 |
| tgggagccaaggggccggg | 3838 | cccggccccttggctccca | 5229 | tcccatggacgcagccaca | 6620 | tgtggctgcgtccatggga | 8010 |
| gggagccaaggggccgggg | 3839 | ccccggccccttggctccc | 5230 | cccatggacgcagccacag | 6621 | ctgtggctgcgtccatggg | 8011 |
| ggagccaaggggccggggc | 3840 | gccccggccccttggctcc | 5231 | ccatggacgcagccacagc | 6622 | gctgtggctgcgtccatgg | 8012 |
| gagccaaggggccggggcg | 3841 | cgccccggccccttggctc | 5232 | catggacgcagccacagcc | 6623 | ggctgtggctgcgtccatg | 8013 |
| agccaaggggccggggcgg | 3842 | ccgccccggccccttggct | 5233 | atggacgcagccacagcct | 6624 | aggctgtggctgcgtccat | 8014 |
| gccaaggggccggggcggg | 3843 | cccgccccggccccttggc | 5234 | tggacgcagccacagcctc | 6625 | gaggctgtggctgcgtcca | 8015 |
| ccaaggggccggggcggga | 3844 | tcccgccccggccccttgg | 5235 | ggacgcagccacagcctcc | 6626 | ggaggctgtggctgcgtcc | 8016 |
| caaggggccggggcgggac | 3845 | gtcccgccccggccccttg | 5236 | gacgcagccacagcctccc | 6627 | gggaggctgtggctgcgtc | 8017 |
| aaggggccggggcgggacg | 3846 | cgtcccgccccggcccctt | 5237 | acgcagccacagcctccct | 6628 | agggaggctgtggctgcgt | 8018 |
| aggggccggggcgggacgc | 3847 | gcgtcccgccccggcccct | 5238 | cgcagccacagcctccctc | 6629 | gagggaggctgtggctgcg | 8019 |
| ggggccggggcgggacgcg | 3848 | cgcgtcccgccccggcccc | 5239 | gcagccacagcctccctcc | 6630 | ggagggaggctgtggctgc | 8020 |
| gggccggggcgggacgcgg | 3849 | ccgcgtcccgccccggccc | 5240 | cagccacagcctccctcct | 6631 | aggagggaggctgtggctg | 8021 |
| ggccggggcgggacgcgga | 3850 | tccgcgtcccgccccggcc | 5241 | agccacagcctccctcctc | 6632 | gaggagggaggctgtggct | 8022 |
| gccggggcgggacgcggag | 3851 | ctccgcgtcccgccccggc | 5242 | gccacagcctccctcctca | 6633 | tgaggagggaggctgtggc | 8023 |
| ccggggcgggacgcggaga | 3852 | tctccgcgtcccgccccgg | 5243 | ccacagcctccctcctcaa | 6634 | ttgaggagggaggctgtgg | 8024 |
| cggggcgggacgcggagag | 3853 | ctctccgcgtcccgccccg | 5244 | cacagcctccctcctcaat | 6635 | attgaggagggaggctgtg | 8025 |
| ggggcgggacgcggagagg | 3854 | cctctccgcgtcccgcccc | 5245 | acagcctccctcctcaatg | 6636 | cattgaggagggaggctgt | 8026 |
| gggcgggacgcggagaggc | 3855 | gcctctccgcgtcccgccc | 5246 | cagcctccctcctcaatgt | 6637 | acattgaggagggaggctg | 8027 |
| ggcgggacgcggagaggct | 3856 | agcctctccgcgtcccgcc | 5247 | agcctccctcctcaatgtc | 6638 | gacattgaggagggaggct | 8028 |
| gcgggacgcggagaggctg | 3857 | cagcctctccgcgtcccgc | 5248 | gcctccctcctcaatgtct | 6639 | agacattgaggagggaggc | 8029 |
| cgggacgcggagaggctgg | 3858 | ccagcctctccgcgtcccg | 5249 | cctccctcctcaatgtctt | 6640 | aagacattgaggagggagg | 8030 |
| gggacgcggagaggctggg | 3859 | cccagcctctccgcgtccc | 5250 | ctccctcctcaatgtcttc | 6641 | gaagacattgaggagggag | 8031 |
| ggacgcggagaggctgggc | 3860 | gcccagcctctccgcgtcc | 5251 | tccctcctcaatgtcttca | 6642 | tgaagacattgaggaggga | 8032 |
| gacgcggagaggctgggct | 3861 | agcccagcctctccgcgtc | 5252 | ccctcctcaatgtcttcag | 6643 | ctgaagacattgaggaggg | 8033 |
| acgcggagaggctgggctg | 3862 | cagcccagcctctccgcgt | 5253 | cctcctcaatgtcttcagt | 6644 | actgaagacattgaggagg | 8034 |
| cgcggagaggctgggctgc | 3863 | gcagcccagcctctccgcg | 5254 | ctcctcaatgtcttcagtg | 6645 | cactgaagacattgaggag | 8035 |
| gcggagaggctgggctgcg | 3864 | cgcagcccagcctctccgc | 5255 | tcctcaatgtcttcagtgg | 6646 | ccactgaagacattgagga | 8036 |
| cggagaggctgggctgcgg | 3865 | ccgcagcccagcctctccg | 5256 | cctcaatgtcttcagtggg | 6647 | cccactgaagacattgagg | 8037 |
| ggagaggctgggctgcggt | 3866 | accgcagcccagcctctcc | 5257 | ctcaatgtcttcagtggga | 6648 | tcccactgaagacattgag | 8038 |
| gagaggctgggctgcggtt | 3867 | aaccgcagcccagcctctc | 5258 | tcaatgtcttcagtgggaa | 6649 | ttcccactgaagacattga | 8039 |
| agaggctgggctgcggttc | 3868 | gaaccgcagcccagcctct | 5259 | caatgtcttcagtgggaat | 6650 | attcccactgaagacattg | 8040 |
| gaggctgggctgcggttcg | 3869 | cgaaccgcagcccagcctc | 5260 | aatgtcttcagtgggaatg | 6651 | cattcccactgaagacatt | 8041 |
| aggctgggctgcggttcgg | 3870 | ccgaaccgcagcccagcct | 5261 | atgtcttcagtgggaatga | 6652 | tcattcccactgaagacat | 8042 |
| ggctgggctgcggttcgga | 3871 | tccgaaccgcagcccagcc | 5262 | tgtcttcagtgggaatgag | 6653 | ctcattcccactgaagaca | 8043 |
| gctgggctgcggttcggag | 3872 | ctccgaaccgcagcccagc | 5263 | gtcttcagtgggaatgagt | 6654 | actcattcccactgaagac | 8044 |
| ctgggctgcggttcggagt | 3873 | actccgaaccgcagcccag | 5264 | tcttcagtgggaatgagtg | 6655 | cactcattcccactgaaga | 8045 |
| tgggctgcggttcggagtc | 3874 | gactccgaaccgcagccca | 5265 | cttcagtgggaatgagtgt | 6656 | acactcattcccactgaag | 8046 |
| gggctgcggttcggagtcc | 3875 | ggactccgaaccgcagccc | 5266 | ttcagtgggaatgagtgtg | 6657 | cacactcattcccactgaa | 8047 |
| ggctgcggttcggagtccc | 3876 | gggactccgaaccgcagcc | 5267 | tcagtgggaatgagtgtgg | 6658 | ccacactcattcccactga | 8048 |
| gctgcggttcggagtcccg | 3877 | cgggactccgaaccgcagc | 5268 | cagtgggaatgagtgtggg | 6659 | cccacactcattcccactg | 8049 |
| ctgcggttcggagtcccgc | 3878 | gcgggactccgaaccgcag | 5269 | agtgggaatgagtgtgggg | 6660 | ccccacactcattcccact | 8050 |
| tgcggttcggagtcccgcg | 3879 | cgcgggactccgaaccgca | 5270 | gtgggaatgagtgtggggc | 6661 | gccccacactcattcccac | 8051 |
| gcggttcggagtcccgcgc | 3880 | gcgcgggactccgaaccgc | 5271 | tgggaatgagtgtggggct | 6662 | agccccacactcattccca | 8052 |
| cggttcggagtcccgcgcg | 3881 | cgcgcgggactccgaaccg | 5272 | gggaatgagtgtggggctg | 6663 | cagccccacactcattccc | 8053 |
| ggttcggagtcccgcgcgg | 3882 | ccgcgcgggactccgaacc | 5273 | ggaatgagtgtggggctga | 6664 | tcagccccacactcattcc | 8054 |
| gttcggagtcccgcgcgga | 3883 | tccgcgcgggactccgaac | 5274 | gaatgagtgtggggctgag | 6665 | ctcagccccacactcattc | 8055 |
| ttcggagtcccgcgcggac | 3884 | gtccgcgcgggactccgaa | 5275 | aatgagtgtggggctgagg | 6666 | cctcagccccacactcatt | 8056 |
| tcggagtcccgcgcggaca | 3885 | tgtccgcgcgggactccga | 5276 | atgagtgtggggctgaggg | 6667 | ccctcagccccacactcat | 8057 |
| cggagtcccgcgcggacag | 3886 | ctgtccgcgcgggactccg | 5277 | tgagtgtggggctgagggc | 6668 | gccctcagccccacactca | 8058 |
| ggagtcccgcgcggacagg | 3887 | cctgtccgcgcgggactcc | 5278 | gagtgtggggctgagggct | 6669 | agccctcagccccacactc | 8059 |
| gagtcccgcgcggacaggg | 3888 | ccctgtccgcgcgggactc | 5279 | agtgtggggctgagggctc | 6670 | gagccctcagccccacact | 8060 |
| agtcccgcgcggacagggg | 3889 | cccctgtccgcgcgggact | 5280 | gtgtggggctgagggctcc | 6671 | ggagccctcagccccacac | 8061 |
| gtcccgcgcggacaggggc | 3890 | gcccctgtccgcgcgggac | 5281 | tgtggggctgagggctcct | 6672 | aggagccctcagccccaca | 8062 |
| tcccgcgcggacaggggcc | 3891 | ggcccctgtccgcgcggga | 5282 | gtggggctgagggctcctg | 6673 | caggagccctcagccccac | 8063 |
| cccgcgcggacaggggccg | 3892 | cggcccctgtccgcgcggg | 5283 | tggggctgagggctcctgg | 6674 | ccaggagccctcagcccca | 8064 |
| ccgcgcggacaggggccgg | 3893 | ccggcccctgtccgcgcgg | 5284 | ggggctgagggctcctggc | 6675 | gccaggagccctcagcccc | 8065 |
| cgcgcggacaggggccgga | 3894 | tccggcccctgtccgcgcg | 5285 | gggctgagggctcctggca | 6676 | tgccaggagccctcagccc | 8066 |
| gcgcggacaggggccggac | 3895 | gtccggcccctgtccgcgc | 5286 | ggctgagggctcctggcag | 6677 | ctgccaggagccctcagcc | 8067 |
| cgcggacaggggccggacg | 3896 | cgtccggcccctgtccgcg | 5287 | gctgagggctcctggcagg | 6678 | cctgccaggagccctcagc | 8068 |
| gcggacaggggccggacgg | 3897 | ccgtccggcccctgtccgc | 5288 | ctgagggctcctggcaggt | 6679 | acctgccaggagccctcag | 8069 |
| cggacaggggccggacggc | 3898 | gccgtccggcccctgtccg | 5289 | tgagggctcctggcaggtg | 6680 | cacctgccaggagccctca | 8070 |
| ggacaggggccggacggcg | 3899 | cgccgtccggcccctgtcc | 5290 | gagggctcctggcaggtgg | 6681 | ccacctgccaggagccctc | 8071 |
| gacaggggccggacggcgg | 3900 | ccgccgtccggcccctgtc | 5291 | agggctcctggcaggtggg | 6682 | cccacctgccaggagccct | 8072 |
| acaggggccggacggcggc | 3901 | gccgccgtccggcccctgt | 5292 | gggctcctggcaggtgggt | 6683 | acccacctgccaggagccc | 8073 |
| caggggccggacggcggcg | 3902 | cgccgccgtccggcccctg | 5293 | ggctcctggcaggtgggta | 6684 | tacccacctgccaggagcc | 8074 |
| aggggccggacggcggcga | 3903 | tcgccgccgtccggcccct | 5294 | gctcctggcaggtgggtat | 6685 | atacccacctgccaggagc | 8075 |
| ggggccggacggcggcgag | 3904 | ctcgccgccgtccggcccc | 5295 | ctcctggcaggtgggtatc | 6686 | gatacccacctgccaggag | 8076 |
| gggccggacggcggcgagg | 3905 | cctcgccgccgtccggccc | 5296 | tcctggcaggtgggtatcc | 6687 | ggatacccacctgccagga | 8077 |
| ggccggacggcggcgaggg | 3906 | ccctcgccgccgtccggcc | 5297 | cctggcaggtgggtatcca | 6688 | tggatacccacctgccagg | 8078 |
| gccggacggcggcgaggga | 3907 | tccctcgccgccgtccggc | 5298 | ctggcaggtgggtatccaa | 6689 | ttggatacccacctgccag | 8079 |
| ccggacggcggcgagggag | 3908 | ctccctcgccgccgtccgg | 5299 | tggcaggtgggtatccaac | 6690 | gttggatacccacctgcca | 8080 |
| cggacggcggcgagggagc | 3909 | gctccctcgccgccgtccg | 5300 | ggcaggtgggtatccaaca | 6691 | tgttggatacccacctgcc | 8081 |
| ggacggcggcgagggagcg | 3910 | cgctccctcgccgccgtcc | 5301 | gcaggtgggtatccaacag | 6692 | ctgttggatacccacctgc | 8082 |
| gacggcggcgagggagcgc | 3911 | gcgctccctcgccgccgtc | 5302 | caggtgggtatccaacagg | 6693 | cctgttggatacccacctg | 8083 |
| acggcggcgagggagcgcg | 3912 | cgcgctccctcgccgccgt | 5303 | aggtgggtatccaacagga | 6694 | tcctgttggatacccacct | 8084 |
| cggcggcgagggagcgcgc | 3913 | gcgcgctccctcgccgccg | 5304 | ggtgggtatccaacaggat | 6695 | atcctgttggatacccacc | 8085 |
| ggcggcgagggagcgcgcg | 3914 | cgcgcgctccctcgccgcc | 5305 | gtgggtatccaacaggatg | 6696 | catcctgttggatacccac | 8086 |
| gcggcgagggagcgcgcgc | 3915 | gcgcgcgctccctcgccgc | 5306 | tgggtatccaacaggatgt | 6697 | acatcctgttggataccca | 8087 |
| cggcgagggagcgcgcgcc | 3916 | ggcgcgcgctccctcgccg | 5307 | gggtatccaacaggatgtg | 6698 | cacatcctgttggataccc | 8088 |
| ggcgagggagcgcgcgccc | 3917 | gggcgcgcgctccctcgcc | 5308 | ggtatccaacaggatgtga | 6699 | tcacatcctgttggatacc | 8089 |
| gcgagggagcgcgcgcccc | 3918 | ggggcgcgcgctccctcgc | 5309 | gtatccaacaggatgtgac | 6700 | gtcacatcctgttggatac | 8090 |
| cgagggagcgcgcgccccg | 3919 | cggggcgcgcgctccctcg | 5310 | tatccaacaggatgtgaca | 6701 | tgtcacatcctgttggata | 8091 |
| gagggagcgcgcgccccgc | 3920 | gcggggcgcgcgctccctc | 5311 | atccaacaggatgtgacac | 6702 | gtgtcacatcctgttggat | 8092 |
| agggagcgcgcgccccgca | 3921 | tgcggggcgcgcgctccct | 5312 | tccaacaggatgtgacaca | 6703 | tgtgtcacatcctgttgga | 8093 |
| gggagcgcgcgccccgcag | 3922 | ctgcggggcgcgcgctccc | 5313 | ccaacaggatgtgacacat | 6704 | atgtgtcacatcctgttgg | 8094 |
| ggagcgcgcgccccgcagt | 3923 | actgcggggcgcgcgctcc | 5314 | caacaggatgtgacacata | 6705 | tatgtgtcacatcctgttg | 8095 |
| gagcgcgcgccccgcagtc | 3924 | gactgcggggcgcgcgctc | 5315 | aacaggatgtgacacatac | 6706 | gtatgtgtcacatcctgtt | 8096 |
| agcgcgcgccccgcagtcc | 3925 | ggactgcggggcgcgcgct | 5316 | acaggatgtgacacatacc | 6707 | ggtatgtgtcacatcctgt | 8097 |
| gcgcgcgccccgcagtccc | 3926 | gggactgcggggcgcgcgc | 5317 | caggatgtgacacatacca | 6708 | tggtatgtgtcacatcctg | 8098 |
| cgcgcgccccgcagtcccg | 3927 | cgggactgcggggcgcgcg | 5318 | aggatgtgacacataccaa | 6709 | ttggtatgtgtcacatcct | 8099 |
| gcgcgccccgcagtcccgc | 3928 | gcgggactgcggggcgcgc | 5319 | ggatgtgacacataccaat | 6710 | attggtatgtgtcacatcc | 8100 |
| cgcgccccgcagtcccgcg | 3929 | cgcgggactgcggggcgcg | 5320 | gatgtgacacataccaatg | 6711 | cattggtatgtgtcacatc | 8101 |
| gcgccccgcagtcccgcgc | 3930 | gcgcgggactgcggggcgc | 5321 | atgtgacacataccaatgg | 6712 | ccattggtatgtgtcacat | 8102 |
| cgccccgcagtcccgcgct | 3931 | agcgcgggactgcggggcg | 5322 | tgtgacacataccaatggc | 6713 | gccattggtatgtgtcaca | 8103 |
| gccccgcagtcccgcgctg | 3932 | cagcgcgggactgcggggc | 5323 | gtgacacataccaatggct | 6714 | agccattggtatgtgtcac | 8104 |
| ccccgcagtcccgcgctgc | 3933 | gcagcgcgggactgcgggg | 5324 | tgacacataccaatggctg | 6715 | cagccattggtatgtgtca | 8105 |
| cccgcagtcccgcgctgcg | 3934 | cgcagcgcgggactgcggg | 5325 | gacacataccaatggctgc | 6716 | gcagccattggtatgtgtc | 8106 |
| ccgcagtcccgcgctgcgc | 3935 | gcgcagcgcgggactgcgg | 5326 | acacataccaatggctgcg | 6717 | cgcagccattggtatgtgt | 8107 |
| cgcagtcccgcgctgcgcc | 3936 | ggcgcagcgcgggactgcg | 5327 | cacataccaatggctgcgt | 6718 | acgcagccattggtatgtg | 8108 |
| gcagtcccgcgctgcgccg | 3937 | cggcgcagcgcgggactgc | 5328 | acataccaatggctgcgtg | 6719 | cacgcagccattggtatgt | 8109 |
| cagtcccgcgctgcgccgg | 3938 | ccggcgcagcgcgggactg | 5329 | cataccaatggctgcgtgg | 6720 | ccacgcagccattggtatg | 8110 |
| agtcccgcgctgcgccggc | 3939 | gccggcgcagcgcgggact | 5330 | ataccaatggctgcgtggc | 6721 | gccacgcagccattggtat | 8111 |
| gtcccgcgctgcgccggcc | 3940 | ggccggcgcagcgcgggac | 5331 | taccaatggctgcgtggct | 6722 | agccacgcagccattggta | 8112 |
| tcccgcgctgcgccggccg | 3941 | cggccggcgcagcgcggga | 5332 | accaatggctgcgtggctc | 6723 | gagccacgcagccattggt | 8113 |
| cccgcgctgcgccggccgg | 3942 | ccggccggcgcagcgcggg | 5333 | ccaatggctgcgtggctct | 6724 | agagccacgcagccattgg | 8114 |
| ccgcgctgcgccggccggg | 3943 | cccggccggcgcagcgcgg | 5334 | caatggctgcgtggctctg | 6725 | cagagccacgcagccattg | 8115 |
| cgcgctgcgccggccgggg | 3944 | ccccggccggcgcagcgcg | 5335 | aatggctgcgtggctctgg | 6726 | ccagagccacgcagccatt | 8116 |
| gcgctgcgccggccgggga | 3945 | tccccggccggcgcagcgc | 5336 | atggctgcgtggctctggg | 6727 | cccagagccacgcagccat | 8117 |
| cgctgcgccggccggggat | 3946 | atccccggccggcgcagcg | 5337 | tggctgcgtggctctgggc | 6728 | gcccagagccacgcagcca | 8118 |
| gctgcgccggccggggatg | 3947 | catccccggccggcgcagc | 5338 | ggctgcgtggctctgggca | 6729 | tgcccagagccacgcagcc | 8119 |
| ctgcgccggccggggatgg | 3948 | ccatccccggccggcgcag | 5339 | gctgcgtggctctgggcat | 6730 | atgcccagagccacgcagc | 8120 |
| tgcgccggccggggatggg | 3949 | cccatccccggccggcgca | 5340 | ctgcgtggctctgggcatc | 6731 | gatgcccagagccacgcag | 8121 |
| gcgccggccggggatgggg | 3950 | ccccatccccggccggcgc | 5341 | tgcgtggctctgggcatca | 6732 | tgatgcccagagccacgca | 8122 |
| cgccggccggggatggggc | 3951 | gccccatccccggccggcg | 5342 | gcgtggctctgggcatcaa | 6733 | ttgatgcccagagccacgc | 8123 |
| gccggccggggatggggcg | 3952 | cgccccatccccggccggc | 5343 | cgtggctctgggcatcaaa | 6734 | tttgatgcccagagccacg | 8124 |
| ccggccggggatggggcgc | 3953 | gcgccccatccccggccgg | 5344 | gtggctctgggcatcaaac | 6735 | gtttgatgcccagagccac | 8125 |
| cggccggggatggggcgcg | 3954 | cgcgccccatccccggccg | 5345 | tggctctgggcatcaaact | 6736 | agtttgatgcccagagcca | 8126 |
| ggccggggatggggcgcgc | 3955 | gcgcgccccatccccggcc | 5346 | ggctctgggcatcaaacta | 6737 | tagtttgatgcccagagcc | 8127 |
| gccggggatggggcgcgct | 3956 | agcgcgccccatccccggc | 5347 | gctctgggcatcaaactac | 6738 | gtagtttgatgcccagagc | 8128 |
| ccggggatggggcgcgctg | 3957 | cagcgcgccccatccccgg | 5348 | ctctgggcatcaaactacc | 6739 | ggtagtttgatgcccagag | 8129 |
| cggggatggggcgcgctgc | 3958 | gcagcgcgccccatccccg | 5349 | tctgggcatcaaactacct | 6740 | aggtagtttgatgcccaga | 8130 |
| ggggatggggcgcgctgct | 3959 | agcagcgcgccccatcccc | 5350 | ctgggcatcaaactacctc | 6741 | gaggtagtttgatgcccag | 8131 |
| gggatggggcgcgctgctg | 3960 | cagcagcgcgccccatccc | 5351 | tgggcatcaaactacctca | 6742 | tgaggtagtttgatgccca | 8132 |
| ggatggggcgcgctgctgc | 3961 | gcagcagcgcgccccatcc | 5352 | gggcatcaaactacctcac | 6743 | gtgaggtagtttgatgccc | 8133 |
| gatggggcgcgctgctgcc | 3962 | ggcagcagcgcgccccatc | 5353 | ggcatcaaactacctcaca | 6744 | tgtgaggtagtttgatgcc | 8134 |
| atggggcgcgctgctgcct | 3963 | aggcagcagcgcgccccat | 5354 | gcatcaaactacctcacac | 6745 | gtgtgaggtagtttgatgc | 8135 |
| tggggcgcgctgctgcctg | 3964 | caggcagcagcgcgcccca | 5355 | catcaaactacctcacaca | 6746 | tgtgtgaggtagtttgatg | 8136 |
| ggggcgcgctgctgcctga | 3965 | tcaggcagcagcgcgcccc | 5356 | atcaaactacctcacacag | 6747 | ctgtgtgaggtagtttgat | 8137 |
| gggcgcgctgctgcctgag | 3966 | ctcaggcagcagcgcgccc | 5357 | tcaaactacctcacacaga | 6748 | tctgtgtgaggtagtttga | 8138 |
| ggcgcgctgctgcctgagg | 3967 | cctcaggcagcagcgcgcc | 5358 | caaactacctcacacagaa | 6749 | ttctgtgtgaggtagtttg | 8139 |
| gcgcgctgctgcctgaggc | 3968 | gcctcaggcagcagcgcgc | 5359 | aaactacctcacacagaat | 6750 | attctgtgtgaggtagttt | 8140 |
| cgcgctgctgcctgaggcc | 3969 | ggcctcaggcagcagcgcg | 5360 | aactacctcacacagaata | 6751 | tattctgtgtgaggtagtt | 8141 |
| gcgctgctgcctgaggccc | 3970 | gggcctcaggcagcagcgc | 5361 | actacctcacacagaatat | 6752 | atattctgtgtgaggtagt | 8142 |
| cgctgctgcctgaggcccg | 3971 | cgggcctcaggcagcagcg | 5362 | ctacctcacacagaatatg | 6753 | catattctgtgtgaggtag | 8143 |
| gctgctgcctgaggcccgg | 3972 | ccgggcctcaggcagcagc | 5363 | tacctcacacagaatatga | 6754 | tcatattctgtgtgaggta | 8144 |
| ctgctgcctgaggcccggc | 3973 | gccgggcctcaggcagcag | 5364 | acctcacacagaatatgag | 6755 | ctcatattctgtgtgaggt | 8145 |
| tgctgcctgaggcccggcc | 3974 | ggccgggcctcaggcagca | 5365 | cctcacacagaatatgaga | 6756 | tctcatattctgtgtgagg | 8146 |
| gctgcctgaggcccggcct | 3975 | aggccgggcctcaggcagc | 5366 | ctcacacagaatatgagat | 6757 | atctcatattctgtgtgag | 8147 |
| ctgcctgaggcccggcctg | 3976 | caggccgggcctcaggcag | 5367 | tcacacagaatatgagatc | 6758 | gatctcatattctgtgtga | 8148 |
| tgcctgaggcccggcctgg | 3977 | ccaggccgggcctcaggca | 5368 | cacacagaatatgagatct | 6759 | agatctcatattctgtgtg | 8149 |
| gcctgaggcccggcctggc | 3978 | gccaggccgggcctcaggc | 5369 | acacagaatatgagatctt | 6760 | aagatctcatattctgtgt | 8150 |
| cctgaggcccggcctggcg | 3979 | cgccaggccgggcctcagg | 5370 | cacagaatatgagatcttc | 6761 | gaagatctcatattctgtg | 8151 |
| ctgaggcccggcctggcgg | 3980 | ccgccaggccgggcctcag | 5371 | acagaatatgagatcttca | 6762 | tgaagatctcatattctgt | 8152 |
| tgaggcccggcctggcggg | 3981 | cccgccaggccgggcctca | 5372 | cagaatatgagatcttcaa | 6763 | ttgaagatctcatattctg | 8153 |
| gaggcccggcctggcgggc | 3982 | gcccgccaggccgggcctc | 5373 | agaatatgagatcttcaaa | 6764 | tttgaagatctcatattct | 8154 |
| aggcccggcctggcgggcg | 3983 | cgcccgccaggccgggcct | 5374 | gaatatgagatcttcaaaa | 6765 | ttttgaagatctcatattc | 8155 |
| ggcccggcctggcgggcgc | 3984 | gcgcccgccaggccgggcc | 5375 | aatatgagatcttcaaaat | 6766 | attttgaagatctcatatt | 8156 |
| gcccggcctggcgggcgcc | 3985 | ggcgcccgccaggccgggc | 5376 | atatgagatcttcaaaatg | 6767 | cattttgaagatctcatat | 8157 |
| cccggcctggcgggcgccc | 3986 | gggcgcccgccaggccggg | 5377 | tatgagatcttcaaaatgg | 6768 | ccattttgaagatctcata | 8158 |
| ccggcctggcgggcgcccg | 3987 | cgggcgcccgccaggccgg | 5378 | atgagatcttcaaaatgga | 6769 | tccattttgaagatctcat | 8159 |
| cggcctggcgggcgcccgc | 3988 | gcgggcgcccgccaggccg | 5379 | tgagatcttcaaaatggag | 6770 | ctccattttgaagatctca | 8160 |
| ggcctggcgggcgcccgcc | 3989 | ggcgggcgcccgccaggcc | 5380 | gagatcttcaaaatggagc | 6771 | gctccattttgaagatctc | 8161 |
| gcctggcgggcgcccgccg | 3990 | cggcgggcgcccgccaggc | 5381 | agatcttcaaaatggagca | 6772 | tgctccattttgaagatct | 8162 |
| cctggcgggcgcccgccgg | 3991 | ccggcgggcgcccgccagg | 5382 | gatcttcaaaatggagcaa | 6773 | ttgctccattttgaagatc | 8163 |
| ctggcgggcgcccgccggg | 3992 | cccggcgggcgcccgccag | 5383 | atcttcaaaatggagcaag | 6774 | cttgctccattttgaagat | 8164 |
| tggcgggcgcccgccgggg | 3993 | ccccggcgggcgcccgcca | 5384 | tcttcaaaatggagcaaga | 6775 | tcttgctccattttgaaga | 8165 |
| ggcgggcgcccgccggggg | 3994 | cccccggcgggcgcccgcc | 5385 | cttcaaaatggagcaagac | 6776 | gtcttgctccattttgaag | 8166 |
| gcgggcgcccgccgggggc | 3995 | gcccccggcgggcgcccgc | 5386 | ttcaaaatggagcaagaca | 6777 | tgtcttgctccattttgaa | 8167 |
| cgggcgcccgccgggggct | 3996 | agcccccggcgggcgcccg | 5387 | tcaaaatggagcaagacac | 6778 | gtgtcttgctccattttga | 8168 |
| gggcgcccgccgggggctg | 3997 | cagcccccggcgggcgccc | 5388 | caaaatggagcaagacacc | 6779 | ggtgtcttgctccattttg | 8169 |
| ggcgcccgccgggggctgc | 3998 | gcagcccccggcgggcgcc | 5389 | aaaatggagcaagacaccc | 6780 | gggtgtcttgctccatttt | 8170 |
| gcgcccgccgggggctgcg | 3999 | cgcagcccccggcgggcgc | 5390 | aaatggagcaagacacccg | 6781 | cgggtgtcttgctccattt | 8171 |
| cgcccgccgggggctgcgg | 4000 | ccgcagcccccggcgggcg | 5391 | aatggagcaagacacccga | 6782 | tcgggtgtcttgctccatt | 8172 |
| gcccgccgggggctgcggc | 4001 | gccgcagcccccggcgggc | 5392 | atggagcaagacacccgag | 6783 | ctcgggtgtcttgctccat | 8173 |
| cccgccgggggctgcggct | 4002 | agccgcagcccccggcggg | 5393 | tggagcaagacacccgagg | 6784 | cctcgggtgtcttgctcca | 8174 |
| ccgccgggggctgcggctg | 4003 | cagccgcagcccccggcgg | 5394 | ggagcaagacacccgaggc | 6785 | gcctcgggtgtcttgctcc | 8175 |
| cgccgggggctgcggctga | 4004 | tcagccgcagcccccggcg | 5395 | gagcaagacacccgaggcc | 6786 | ggcctcgggtgtcttgctc | 8176 |
| gccgggggctgcggctgag | 4005 | ctcagccgcagcccccggc | 5396 | agcaagacacccgaggccg | 6787 | cggcctcgggtgtcttgct | 8177 |
| ccgggggctgcggctgagg | 4006 | cctcagccgcagcccccgg | 5397 | gcaagacacccgaggccgc | 6788 | gcggcctcgggtgtcttgc | 8178 |
| cgggggctgcggctgagga | 4007 | tcctcagccgcagcccccg | 5398 | caagacacccgaggccgct | 6789 | agcggcctcgggtgtcttg | 8179 |
| gggggctgcggctgaggag | 4008 | ctcctcagccgcagccccc | 5399 | aagacacccgaggccgcta | 6790 | tagcggcctcgggtgtctt | 8180 |
| ggggctgcggctgaggagc | 4009 | gctcctcagccgcagcccc | 5400 | agacacccgaggccgctac | 6791 | gtagcggcctcgggtgtct | 8181 |
| gggctgcggctgaggagcc | 4010 | ggctcctcagccgcagccc | 5401 | gacacccgaggccgctacc | 6792 | ggtagcggcctcgggtgtc | 8182 |
| ggctgcggctgaggagccg | 4011 | cggctcctcagccgcagcc | 5402 | acacccgaggccgctacct | 6793 | aggtagcggcctcgggtgt | 8183 |
| gctgcggctgaggagccga | 4012 | tcggctcctcagccgcagc | 5403 | cacccgaggccgctacctg | 6794 | caggtagcggcctcgggtg | 8184 |
| ctgcggctgaggagccgag | 4013 | ctcggctcctcagccgcag | 5404 | acccgaggccgctacctgc | 6795 | gcaggtagcggcctcgggt | 8185 |
| tgcggctgaggagccgagg | 4014 | cctcggctcctcagccgca | 5405 | cccgaggccgctacctgct | 6796 | agcaggtagcggcctcggg | 8186 |
| gcggctgaggagccgaggg | 4015 | ccctcggctcctcagccgc | 5406 | ccgaggccgctacctgctg | 6797 | cagcaggtagcggcctcgg | 8187 |
| cggctgaggagccgagggc | 4016 | gccctcggctcctcagccg | 5407 | cgaggccgctacctgctgt | 6798 | acagcaggtagcggcctcg | 8188 |
| ggctgaggagccgagggcg | 4017 | cgccctcggctcctcagcc | 5408 | gaggccgctacctgctgtt | 6799 | aacagcaggtagcggcctc | 8189 |
| gctgaggagccgagggcgc | 4018 | gcgccctcggctcctcagc | 5409 | aggccgctacctgctgttc | 6800 | gaacagcaggtagcggcct | 8190 |
| ctgaggagccgagggcgcc | 4019 | ggcgccctcggctcctcag | 5410 | ggccgctacctgctgttca | 6801 | tgaacagcaggtagcggcc | 8191 |
| tgaggagccgagggcgccc | 4020 | gggcgccctcggctcctca | 5411 | gccgctacctgctgttcaa | 6802 | ttgaacagcaggtagcggc | 8192 |
| gaggagccgagggcgccct | 4021 | agggcgccctcggctcctc | 5412 | ccgctacctgctgttcaat | 6803 | attgaacagcaggtagcgg | 8193 |
| aggagccgagggcgccctg | 4022 | cagggcgccctcggctcct | 5413 | cgctacctgctgttcaatg | 6804 | cattgaacagcaggtagcg | 8194 |
| ggagccgagggcgccctgt | 4023 | acagggcgccctcggctcc | 5414 | gctacctgctgttcaatgg | 6805 | ccattgaacagcaggtagc | 8195 |
| gagccgagggcgccctgta | 4024 | tacagggcgccctcggctc | 5415 | ctacctgctgttcaatggc | 6806 | gccattgaacagcaggtag | 8196 |
| agccgagggcgccctgtac | 4025 | gtacagggcgccctcggct | 5416 | tacctgctgttcaatggcc | 6807 | ggccattgaacagcaggta | 8197 |
| gccgagggcgccctgtacc | 4026 | ggtacagggcgccctcggc | 5417 | acctgctgttcaatggcca | 6808 | tggccattgaacagcaggt | 8198 |
| ccgagggcgccctgtaccg | 4027 | cggtacagggcgccctcgg | 5418 | cctgctgttcaatggccag | 6809 | ctggccattgaacagcagg | 8199 |
| cgagggcgccctgtaccgg | 4028 | ccggtacagggcgccctcg | 5419 | ctgctgttcaatggccaga | 6810 | tctggccattgaacagcag | 8200 |
| gagggcgccctgtaccgga | 4029 | tccggtacagggcgccctc | 5420 | tgctgttcaatggccagag | 6811 | ctctggccattgaacagca | 8201 |
| agggcgccctgtaccggag | 4030 | ctccggtacagggcgccct | 5421 | gctgttcaatggccagagg | 6812 | cctctggccattgaacagc | 8202 |
| gggcgccctgtaccggagt | 4031 | actccggtacagggcgccc | 5422 | ctgttcaatggccagaggc | 6813 | gcctctggccattgaacag | 8203 |
| ggcgccctgtaccggagtg | 4032 | cactccggtacagggcgcc | 5423 | tgttcaatggccagaggcc | 6814 | ggcctctggccattgaaca | 8204 |
| gcgccctgtaccggagtgg | 4033 | ccactccggtacagggcgc | 5424 | gttcaatggccagaggccc | 6815 | gggcctctggccattgaac | 8205 |
| cgccctgtaccggagtggc | 4034 | gccactccggtacagggcg | 5425 | ttcaatggccagaggccca | 6816 | tgggcctctggccattgaa | 8206 |
| gccctgtaccggagtggcc | 4035 | ggccactccggtacagggc | 5426 | tcaatggccagaggcccag | 6817 | ctgggcctctggccattga | 8207 |
| ccctgtaccggagtggccc | 4036 | gggccactccggtacaggg | 5427 | caatggccagaggcccagc | 6818 | gctgggcctctggccattg | 8208 |
| cctgtaccggagtggcccg | 4037 | cgggccactccggtacagg | 5428 | aatggccagaggcccagcg | 6819 | cgctgggcctctggccatt | 8209 |
| ctgtaccggagtggcccgc | 4038 | gcgggccactccggtacag | 5429 | atggccagaggcccagcga | 6820 | tcgctgggcctctggccat | 8210 |
| tgtaccggagtggcccgcg | 4039 | cgcgggccactccggtaca | 5430 | tggccagaggcccagcgat | 6821 | atcgctgggcctctggcca | 8211 |
| gtaccggagtggcccgcgc | 4040 | gcgcgggccactccggtac | 5431 | ggccagaggcccagcgatg | 6822 | catcgctgggcctctggcc | 8212 |
| taccggagtggcccgcgcg | 4041 | cgcgcgggccactccggta | 5432 | gccagaggcccagcgatgg | 6823 | ccatcgctgggcctctggc | 8213 |
| accggagtggcccgcgcgc | 4042 | gcgcgcgggccactccggt | 5433 | ccagaggcccagcgatggc | 6824 | gccatcgctgggcctctgg | 8214 |
| ccggagtggcccgcgcgcg | 4043 | cgcgcgcgggccactccgg | 5434 | cagaggcccagcgatggct | 6825 | agccatcgctgggcctctg | 8215 |
| cggagtggcccgcgcgcgc | 4044 | gcgcgcgcgggccactccg | 5435 | agaggcccagcgatggctc | 6826 | gagccatcgctgggcctct | 8216 |
| ggagtggcccgcgcgcgcg | 4045 | cgcgcgcgcgggccactcc | 5436 | gaggcccagcgatggctcc | 6827 | ggagccatcgctgggcctc | 8217 |
| gagtggcccgcgcgcgcgc | 4046 | gcgcgcgcgcgggccactc | 5437 | aggcccagcgatggctcca | 6828 | tggagccatcgctgggcct | 8218 |
| agtggcccgcgcgcgcgct | 4047 | agcgcgcgcgcgggccact | 5438 | ggcccagcgatggctccag | 6829 | ctggagccatcgctgggcc | 8219 |
| gtggcccgcgcgcgcgctc | 4048 | gagcgcgcgcgcgggccac | 5439 | gcccagcgatggctccagc | 6830 | gctggagccatcgctgggc | 8220 |
| tggcccgcgcgcgcgctcg | 4049 | cgagcgcgcgcgcgggcca | 5440 | cccagcgatggctccagcc | 6831 | ggctggagccatcgctggg | 8221 |
| ggcccgcgcgcgcgctcgg | 4050 | ccgagcgcgcgcgcgggcc | 5441 | ccagcgatggctccagccc | 6832 | gggctggagccatcgctgg | 8222 |
| gcccgcgcgcgcgctcgga | 4051 | tccgagcgcgcgcgcgggc | 5442 | cagcgatggctccagccca | 6833 | tgggctggagccatcgctg | 8223 |
| cccgcgcgcgcgctcggag | 4052 | ctccgagcgcgcgcgcggg | 5443 | agcgatggctccagcccag | 6834 | ctgggctggagccatcgct | 8224 |
| ccgcgcgcgcgctcggagg | 4053 | cctccgagcgcgcgcgcgg | 5444 | gcgatggctccagcccaga | 6835 | tctgggctggagccatcgc | 8225 |
| cgcgcgcgcgctcggaggg | 4054 | ccctccgagcgcgcgcgcg | 5445 | cgatggctccagcccagac | 6836 | gtctgggctggagccatcg | 8226 |
| gcgcgcgcgctcggagggg | 4055 | cccctccgagcgcgcgcgc | 5446 | gatggctccagcccagaca | 6837 | tgtctgggctggagccatc | 8227 |
| cgcgcgcgctcggaggggg | 4056 | ccccctccgagcgcgcgcg | 5447 | atggctccagcccagacag | 6838 | ctgtctgggctggagccat | 8228 |
| gcgcgcgctcggaggggga | 4057 | tccccctccgagcgcgcgc | 5448 | tggctccagcccagacaga | 6839 | tctgtctgggctggagcca | 8229 |
| cgcgcgctcggagggggac | 4058 | gtccccctccgagcgcgcg | 5449 | ggctccagcccagacagac | 6840 | gtctgtctgggctggagcc | 8230 |
| gcgcgctcggagggggaca | 4059 | tgtccccctccgagcgcgc | 5450 | gctccagcccagacagacc | 6841 | ggtctgtctgggctggagc | 8231 |
| cgcgctcggagggggacag | 4060 | ctgtccccctccgagcgcg | 5451 | ctccagcccagacagacca | 6842 | tggtctgtctgggctggag | 8232 |
| gcgctcggagggggacaga | 4061 | tctgtccccctccgagcgc | 5452 | tccagcccagacagaccag | 6843 | ctggtctgtctgggctgga | 8233 |
| cgctcggagggggacagag | 4062 | ctctgtccccctccgagcg | 5453 | ccagcccagacagaccaga | 6844 | tctggtctgtctgggctgg | 8234 |
| gctcggagggggacagaga | 4063 | tctctgtccccctccgagc | 5454 | cagcccagacagaccagag | 6845 | ctctggtctgtctgggctg | 8235 |
| ctcggagggggacagagac | 4064 | gtctctgtccccctccgag | 5455 | agcccagacagaccagaga | 6846 | tctctggtctgtctgggct | 8236 |
| tcggagggggacagagacg | 4065 | cgtctctgtccccctccga | 5456 | gcccagacagaccagagaa | 6847 | ttctctggtctgtctgggc | 8237 |
| cggagggggacagagacgg | 4066 | ccgtctctgtccccctccg | 5457 | cccagacagaccagagaag | 6848 | cttctctggtctgtctggg | 8238 |
| ggagggggacagagacgga | 4067 | tccgtctctgtccccctcc | 5458 | ccagacagaccagagaaga | 6849 | tcttctctggtctgtctgg | 8239 |
| gagggggacagagacggac | 4068 | gtccgtctctgtccccctc | 5459 | cagacagaccagagaagag | 6850 | ctcttctctggtctgtctg | 8240 |
| agggggacagagacggact | 4069 | agtccgtctctgtccccct | 5460 | agacagaccagagaagaga | 6851 | tctcttctctggtctgtct | 8241 |
| gggggacagagacggacta | 4070 | tagtccgtctctgtccccc | 5461 | gacagaccagagaagagag | 6852 | ctctcttctctggtctgtc | 8242 |
| ggggacagagacggactac | 4071 | gtagtccgtctctgtcccc | 5462 | acagaccagagaagagagc | 6853 | gctctcttctctggtctgt | 8243 |
| gggacagagacggactaca | 4072 | tgtagtccgtctctgtccc | 5463 | cagaccagagaagagagcc | 6854 | ggctctcttctctggtctg | 8244 |
| ggacagagacggactacag | 4073 | ctgtagtccgtctctgtcc | 5464 | agaccagagaagagagcca | 6855 | tggctctcttctctggtct | 8245 |
| gacagagacggactacagc | 4074 | gctgtagtccgtctctgtc | 5465 | gaccagagaagagagccac | 6856 | gtggctctcttctctggtc | 8246 |
| acagagacggactacagcg | 4075 | cgctgtagtccgtctctgt | 5466 | accagagaagagagccaca | 6857 | tgtggctctcttctctggt | 8247 |
| cagagacggactacagcga | 4076 | tcgctgtagtccgtctctg | 5467 | ccagagaagagagccacat | 6858 | atgtggctctcttctctgg | 8248 |
| agagacggactacagcgag | 4077 | ctcgctgtagtccgtctct | 5468 | cagagaagagagccacatc | 6859 | gatgtggctctcttctctg | 8249 |
| gagacggactacagcgagg | 4078 | cctcgctgtagtccgtctc | 5469 | agagaagagagccacatcc | 6860 | ggatgtggctctcttctct | 8250 |
| agacggactacagcgaggc | 4079 | gcctcgctgtagtccgtct | 5470 | gagaagagagccacatcct | 6861 | aggatgtggctctcttctc | 8251 |
| gacggactacagcgaggcc | 4080 | ggcctcgctgtagtccgtc | 5471 | agaagagagccacatccta | 6862 | taggatgtggctctcttct | 8252 |
| acggactacagcgaggccc | 4081 | gggcctcgctgtagtccgt | 5472 | gaagagagccacatcctac | 6863 | gtaggatgtggctctcttc | 8253 |
| cggactacagcgaggcccg | 4082 | cgggcctcgctgtagtccg | 5473 | aagagagccacatcctacc | 6864 | ggtaggatgtggctctctt | 8254 |
| ggactacagcgaggcccgg | 4083 | ccgggcctcgctgtagtcc | 5474 | agagagccacatcctacca | 6865 | tggtaggatgtggctctct | 8255 |
| gactacagcgaggcccgga | 4084 | tccgggcctcgctgtagtc | 5475 | gagagccacatcctaccag | 6866 | ctggtaggatgtggctctc | 8256 |
| actacagcgaggcccggag | 4085 | ctccgggcctcgctgtagt | 5476 | agagccacatcctaccaga | 6867 | tctggtaggatgtggctct | 8257 |
| ctacagcgaggcccggagg | 4086 | cctccgggcctcgctgtag | 5477 | gagccacatcctaccagat | 6868 | atctggtaggatgtggctc | 8258 |
| tacagcgaggcccggagga | 4087 | tcctccgggcctcgctgta | 5478 | agccacatcctaccagatg | 6869 | catctggtaggatgtggct | 8259 |
| acagcgaggcccggaggag | 4088 | ctcctccgggcctcgctgt | 5479 | gccacatcctaccagatgc | 6870 | gcatctggtaggatgtggc | 8260 |
| cagcgaggcccggaggagc | 4089 | gctcctccgggcctcgctg | 5480 | ccacatcctaccagatgcc | 6871 | ggcatctggtaggatgtgg | 8261 |
| agcgaggcccggaggagcc | 4090 | ggctcctccgggcctcgct | 5481 | cacatcctaccagatgccc | 6872 | gggcatctggtaggatgtg | 8262 |
| gcgaggcccggaggagccc | 4091 | gggctcctccgggcctcgc | 5482 | acatcctaccagatgccct | 6873 | agggcatctggtaggatgt | 8263 |
| cgaggcccggaggagcccc | 4092 | ggggctcctccgggcctcg | 5483 | catcctaccagatgccctt | 6874 | aagggcatctggtaggatg | 8264 |
| gaggcccggaggagccccg | 4093 | cggggctcctccgggcctc | 5484 | atcctaccagatgcccttg | 6875 | caagggcatctggtaggat | 8265 |
| aggcccggaggagccccga | 4094 | tcggggctcctccgggcct | 5485 | tcctaccagatgcccttgg | 6876 | ccaagggcatctggtagga | 8266 |
| ggcccggaggagccccgag | 4095 | ctcggggctcctccgggcc | 5486 | cctaccagatgcccttggt | 6877 | accaagggcatctggtagg | 8267 |
| gcccggaggagccccgaga | 4096 | tctcggggctcctccgggc | 5487 | ctaccagatgcccttggtc | 6878 | gaccaagggcatctggtag | 8268 |
| cccggaggagccccgagat | 4097 | atctcggggctcctccggg | 5488 | taccagatgcccttggtcc | 6879 | ggaccaagggcatctggta | 8269 |
| ccggaggagccccgagatg | 4098 | catctcggggctcctccgg | 5489 | accagatgcccttggtcca | 6880 | tggaccaagggcatctggt | 8270 |
| cggaggagccccgagatgt | 4099 | acatctcggggctcctccg | 5490 | ccagatgcccttggtccag | 6881 | ctggaccaagggcatctgg | 8271 |
| ggaggagccccgagatgtc | 4100 | gacatctcggggctcctcc | 5491 | cagatgcccttggtccagt | 6882 | actggaccaagggcatctg | 8272 |
| gaggagccccgagatgtcc | 4101 | ggacatctcggggctcctc | 5492 | agatgcccttggtccagtg | 6883 | cactggaccaagggcatct | 8273 |
| aggagccccgagatgtccc | 4102 | gggacatctcggggctcct | 5493 | gatgcccttggtccagtgt | 6884 | acactggaccaagggcatc | 8274 |
| ggagccccgagatgtcccg | 4103 | cgggacatctcggggctcc | 5494 | atgcccttggtccagtgtg | 6885 | cacactggaccaagggcat | 8275 |
| gagccccgagatgtcccgt | 4104 | acgggacatctcggggctc | 5495 | tgcccttggtccagtgtgc | 6886 | gcacactggaccaagggca | 8276 |
| agccccgagatgtcccgtg | 4105 | cacgggacatctcggggct | 5496 | gcccttggtccagtgtgcc | 6887 | ggcacactggaccaagggc | 8277 |
| gccccgagatgtcccgtgt | 4106 | acacgggacatctcggggc | 5497 | cccttggtccagtgtgcct | 6888 | aggcacactggaccaaggg | 8278 |
| ccccgagatgtcccgtgtg | 4107 | cacacgggacatctcgggg | 5498 | ccttggtccagtgtgcctc | 6889 | gaggcacactggaccaagg | 8279 |
| cccgagatgtcccgtgtgc | 4108 | gcacacgggacatctcggg | 5499 | cttggtccagtgtgcctct | 6890 | agaggcacactggaccaag | 8280 |
| ccgagatgtcccgtgtgcg | 4109 | cgcacacgggacatctcgg | 5500 | ttggtccagtgtgcctctt | 6891 | aagaggcacactggaccaa | 8281 |
| cgagatgtcccgtgtgcgc | 4110 | gcgcacacgggacatctcg | 5501 | tggtccagtgtgcctcttc | 6892 | gaagaggcacactggacca | 8282 |
| gagatgtcccgtgtgcgcc | 4111 | ggcgcacacgggacatctc | 5502 | ggtccagtgtgcctcttcc | 6893 | ggaagaggcacactggacc | 8283 |
| agatgtcccgtgtgcgccg | 4112 | cggcgcacacgggacatct | 5503 | gtccagtgtgcctcttcct | 6894 | aggaagaggcacactggac | 8284 |
| gatgtcccgtgtgcgccgc | 4113 | gcggcgcacacgggacatc | 5504 | tccagtgtgcctcttcctc | 6895 | gaggaagaggcacactgga | 8285 |
| atgtcccgtgtgcgccgcc | 4114 | ggcggcgcacacgggacat | 5505 | ccagtgtgcctcttcctca | 6896 | tgaggaagaggcacactgg | 8286 |
| tgtcccgtgtgcgccgcct | 4115 | aggcggcgcacacgggaca | 5506 | cagtgtgcctcttcctcac | 6897 | gtgaggaagaggcacactg | 8287 |
| gtcccgtgtgcgccgcctt | 4116 | aaggcggcgcacacgggac | 5507 | agtgtgcctcttcctcacc | 6898 | ggtgaggaagaggcacact | 8288 |
| tcccgtgtgcgccgccttc | 4117 | gaaggcggcgcacacggga | 5508 | gtgtgcctcttcctcacca | 6899 | tggtgaggaagaggcacac | 8289 |
| cccgtgtgcgccgccttct | 4118 | agaaggcggcgcacacggg | 5509 | tgtgcctcttcctcaccaa | 6900 | ttggtgaggaagaggcaca | 8290 |
| ccgtgtgcgccgccttctg | 4119 | cagaaggcggcgcacacgg | 5510 | gtgcctcttcctcaccaag | 6901 | cttggtgaggaagaggcac | 8291 |
| cgtgtgcgccgccttctgc | 4120 | gcagaaggcggcgcacacg | 5511 | tgcctcttcctcaccaaga | 6902 | tcttggtgaggaagaggca | 8292 |
| gtgtgcgccgccttctgct | 4121 | agcagaaggcggcgcacac | 5512 | gcctcttcctcaccaagag | 6903 | ctcttggtgaggaagaggc | 8293 |
| tgtgcgccgccttctgctt | 4122 | aagcagaaggcggcgcaca | 5513 | cctcttcctcaccaagagc | 6904 | gctcttggtgaggaagagg | 8294 |
| gtgcgccgccttctgcttg | 4123 | caagcagaaggcggcgcac | 5514 | ctcttcctcaccaagagct | 6905 | agctcttggtgaggaagag | 8295 |
| tgcgccgccttctgcttgg | 4124 | ccaagcagaaggcggcgca | 5515 | tcttcctcaccaagagctg | 6906 | cagctcttggtgaggaaga | 8296 |
| gcgccgccttctgcttgga | 4125 | tccaagcagaaggcggcgc | 5516 | cttcctcaccaagagctga | 6907 | tcagctcttggtgaggaag | 8297 |
| cgccgccttctgcttggat | 4126 | atccaagcagaaggcggcg | 5517 | ttcctcaccaagagctgaa | 6908 | ttcagctcttggtgaggaa | 8298 |
| gccgccttctgcttggata | 4127 | tatccaagcagaaggcggc | 5518 | tcctcaccaagagctgaag | 6909 | cttcagctcttggtgagga | 8299 |
| ccgccttctgcttggatac | 4128 | gtatccaagcagaaggcgg | 5519 | cctcaccaagagctgaaga | 6910 | tcttcagctcttggtgagg | 8300 |
| cgccttctgcttggatacc | 4129 | ggtatccaagcagaaggcg | 5520 | ctcaccaagagctgaagag | 6911 | ctcttcagctcttggtgag | 8301 |
| gccttctgcttggatacct | 4130 | aggtatccaagcagaaggc | 5521 | tcaccaagagctgaagagt | 6912 | actcttcagctcttggtga | 8302 |
| ccttctgcttggatacctg | 4131 | caggtatccaagcagaagg | 5522 | caccaagagctgaagagtt | 6913 | aactcttcagctcttggtg | 8303 |
| cttctgcttggatacctgt | 4132 | acaggtatccaagcagaag | 5523 | accaagagctgaagagttg | 6914 | caactcttcagctcttggt | 8304 |
| ttctgcttggatacctgtt | 4133 | aacaggtatccaagcagaa | 5524 | ccaagagctgaagagttgt | 6915 | acaactcttcagctcttgg | 8305 |
| tctgcttggatacctgttc | 4134 | gaacaggtatccaagcaga | 5525 | caagagctgaagagttgtt | 6916 | aacaactcttcagctcttg | 8306 |
| ctgcttggatacctgttcc | 4135 | ggaacaggtatccaagcag | 5526 | aagagctgaagagttgttg | 6917 | caacaactcttcagctctt | 8307 |
| tgcttggatacctgttccc | 4136 | gggaacaggtatccaagca | 5527 | agagctgaagagttgttgg | 6918 | ccaacaactcttcagctct | 8308 |
| gcttggatacctgttccca | 4137 | tgggaacaggtatccaagc | 5528 | gagctgaagagttgttgga | 6919 | tccaacaactcttcagctc | 8309 |
| cttggatacctgttcccag | 4138 | ctgggaacaggtatccaag | 5529 | agctgaagagttgttggaa | 6920 | ttccaacaactcttcagct | 8310 |
| ttggatacctgttcccagc | 4139 | gctgggaacaggtatccaa | 5530 | gctgaagagttgttggaag | 6921 | cttccaacaactcttcagc | 8311 |
| tggatacctgttcccagcc | 4140 | ggctgggaacaggtatcca | 5531 | ctgaagagttgttggaaga | 6922 | tcttccaacaactcttcag | 8312 |
| ggatacctgttcccagccc | 4141 | gggctgggaacaggtatcc | 5532 | tgaagagttgttggaagac | 6923 | gtcttccaacaactcttca | 8313 |
| gatacctgttcccagccct | 4142 | agggctgggaacaggtatc | 5533 | gaagagttgttggaagaca | 6924 | tgtcttccaacaactcttc | 8314 |
| atacctgttcccagccctc | 4143 | gagggctgggaacaggtat | 5534 | aagagttgttggaagacag | 6925 | ctgtcttccaacaactctt | 8315 |
| tacctgttcccagccctcc | 4144 | ggagggctgggaacaggta | 5535 | agagttgttggaagacagt | 6926 | actgtcttccaacaactct | 8316 |
| acctgttcccagccctcct | 4145 | aggagggctgggaacaggt | 5536 | gagttgttggaagacagtc | 6927 | gactgtcttccaacaactc | 8317 |
| cctgttcccagccctcctg | 4146 | caggagggctgggaacagg | 5537 | agttgttggaagacagtca | 6928 | tgactgtcttccaacaact | 8318 |
| ctgttcccagccctcctgt | 4147 | acaggagggctgggaacag | 5538 | gttgttggaagacagtcaa | 6929 | ttgactgtcttccaacaac | 8319 |
| tgttcccagccctcctgtt | 4148 | aacaggagggctgggaaca | 5539 | ttgttggaagacagtcaag | 6930 | cttgactgtcttccaacaa | 8320 |
| gttcccagccctcctgttg | 4149 | caacaggagggctgggaac | 5540 | tgttggaagacagtcaagg | 6931 | ccttgactgtcttccaaca | 8321 |
| ttcccagccctcctgttgc | 4150 | gcaacaggagggctgggaa | 5541 | gttggaagacagtcaaggt | 6932 | accttgactgtcttccaac | 8322 |
| tcccagccctcctgttgca | 4151 | tgcaacaggagggctggga | 5542 | ttggaagacagtcaaggtc | 6933 | gaccttgactgtcttccaa | 8323 |
| cccagccctcctgttgcat | 4152 | atgcaacaggagggctggg | 5543 | tggaagacagtcaaggtca | 6934 | tgaccttgactgtcttcca | 8324 |
| ccagccctcctgttgcatg | 4153 | catgcaacaggagggctgg | 5544 | ggaagacagtcaaggtcat | 6935 | atgaccttgactgtcttcc | 8325 |
| cagccctcctgttgcatgg | 4154 | ccatgcaacaggagggctg | 5545 | gaagacagtcaaggtcatc | 6936 | gatgaccttgactgtcttc | 8326 |
| agccctcctgttgcatggg | 4155 | cccatgcaacaggagggct | 5546 | aagacagtcaaggtcatct | 6937 | agatgaccttgactgtctt | 8327 |
| gccctcctgttgcatgggc | 4156 | gcccatgcaacaggagggc | 5547 | agacagtcaaggtcatctg | 6938 | cagatgaccttgactgtct | 8328 |
| ccctcctgttgcatgggct | 4157 | agcccatgcaacaggaggg | 5548 | gacagtcaaggtcatctgt | 6939 | acagatgaccttgactgtc | 8329 |
| cctcctgttgcatgggctg | 4158 | cagcccatgcaacaggagg | 5549 | acagtcaaggtcatctgta | 6940 | tacagatgaccttgactgt | 8330 |
| ctcctgttgcatgggctgg | 4159 | ccagcccatgcaacaggag | 5550 | cagtcaaggtcatctgtat | 6941 | atacagatgaccttgactg | 8331 |
| tcctgttgcatgggctggg | 4160 | cccagcccatgcaacagga | 5551 | agtcaaggtcatctgtatg | 6942 | catacagatgaccttgact | 8332 |
| cctgttgcatgggctggga | 4161 | tcccagcccatgcaacagg | 5552 | gtcaaggtcatctgtatgg | 6943 | ccatacagatgaccttgac | 8333 |
| ctgttgcatgggctgggag | 4162 | ctcccagcccatgcaacag | 5553 | tcaaggtcatctgtatggc | 6944 | gccatacagatgaccttga | 8334 |
| tgttgcatgggctgggaga | 4163 | tctcccagcccatgcaaca | 5554 | caaggtcatctgtatggca | 6945 | tgccatacagatgaccttg | 8335 |
| gttgcatgggctgggagag | 4164 | ctctcccagcccatgcaac | 5555 | aaggtcatctgtatggcag | 6946 | ctgccatacagatgacctt | 8336 |
| ttgcatgggctgggagagg | 4165 | cctctcccagcccatgcaa | 5556 | aggtcatctgtatggcagg | 6947 | cctgccatacagatgacct | 8337 |
| tgcatgggctgggagaggg | 4166 | ccctctcccagcccatgca | 5557 | ggtcatctgtatggcaggg | 6948 | ccctgccatacagatgacc | 8338 |
| gcatgggctgggagagggc | 4167 | gccctctcccagcccatgc | 5558 | gtcatctgtatggcagggc | 6949 | gccctgccatacagatgac | 8339 |
| catgggctgggagagggct | 4168 | agccctctcccagcccatg | 5559 | tcatctgtatggcagggca | 6950 | tgccctgccatacagatga | 8340 |
| atgggctgggagagggctc | 4169 | gagccctctcccagcccat | 5560 | catctgtatggcagggcag | 6951 | ctgccctgccatacagatg | 8341 |
| tgggctgggagagggctct | 4170 | agagccctctcccagccca | 5561 | atctgtatggcagggcagc | 6952 | gctgccctgccatacagat | 8342 |
| gggctgggagagggctctg | 4171 | cagagccctctcccagccc | 5562 | tctgtatggcagggcagca | 6953 | tgctgccctgccatacaga | 8343 |
| ggctgggagagggctctgc | 4172 | gcagagccctctcccagcc | 5563 | ctgtatggcagggcagcag | 6954 | ctgctgccctgccatacag | 8344 |
| gctgggagagggctctgcc | 4173 | ggcagagccctctcccagc | 5564 | tgtatggcagggcagcagg | 6955 | cctgctgccctgccataca | 8345 |
| ctgggagagggctctgccc | 4174 | gggcagagccctctcccag | 5565 | gtatggcagggcagcaggg | 6956 | ccctgctgccctgccatac | 8346 |
| tgggagagggctctgccct | 4175 | agggcagagccctctccca | 5566 | tatggcagggcagcaggga | 6957 | tccctgctgccctgccata | 8347 |
| gggagagggctctgccctc | 4176 | gagggcagagccctctccc | 5567 | atggcagggcagcagggag | 6958 | ctccctgctgccctgccat | 8348 |
| ggagagggctctgccctcc | 4177 | ggagggcagagccctctcc | 5568 | tggcagggcagcagggagg | 6959 | cctccctgctgccctgcca | 8349 |
| gagagggctctgccctcct | 4178 | aggagggcagagccctctc | 5569 | ggcagggcagcagggagga | 6960 | tcctccctgctgccctgcc | 8350 |
| agagggctctgccctcctt | 4179 | aaggagggcagagccctct | 5570 | gcagggcagcagggaggac | 6961 | gtcctccctgctgccctgc | 8351 |
| gagggctctgccctccttc | 4180 | gaaggagggcagagccctc | 5571 | cagggcagcagggaggaca | 6962 | tgtcctccctgctgccctg | 8352 |
| agggctctgccctccttca | 4181 | tgaaggagggcagagccct | 5572 | agggcagcagggaggacag | 6963 | ctgtcctccctgctgccct | 8353 |
| gggctctgccctccttcat | 4182 | atgaaggagggcagagccc | 5573 | gggcagcagggaggacagc | 6964 | gctgtcctccctgctgccc | 8354 |
| ggctctgccctccttcatc | 4183 | gatgaaggagggcagagcc | 5574 | ggcagcagggaggacagct | 6965 | agctgtcctccctgctgcc | 8355 |
| gctctgccctccttcatcc | 4184 | ggatgaaggagggcagagc | 5575 | gcagcagggaggacagctg | 6966 | cagctgtcctccctgctgc | 8356 |
| ctctgccctccttcatcca | 4185 | tggatgaaggagggcagag | 5576 | cagcagggaggacagctgg | 6967 | ccagctgtcctccctgctg | 8357 |
| tctgccctccttcatccag | 4186 | ctggatgaaggagggcaga | 5577 | agcagggaggacagctggg | 6968 | cccagctgtcctccctgct | 8358 |
| ctgccctccttcatccaga | 4187 | tctggatgaaggagggcag | 5578 | gcagggaggacagctgggt | 6969 | acccagctgtcctccctgc | 8359 |
| tgccctccttcatccagac | 4188 | gtctggatgaaggagggca | 5579 | cagggaggacagctgggtc | 6970 | gacccagctgtcctccctg | 8360 |
| gccctccttcatccagaca | 4189 | tgtctggatgaaggagggc | 5580 | agggaggacagctgggtcc | 6971 | ggacccagctgtcctccct | 8361 |
| ccctccttcatccagacag | 4190 | ctgtctggatgaaggaggg | 5581 | gggaggacagctgggtccc | 6972 | gggacccagctgtcctccc | 8362 |
| cctccttcatccagacagc | 4191 | gctgtctggatgaaggagg | 5582 | ggaggacagctgggtccct | 6973 | agggacccagctgtcctcc | 8363 |
| ctccttcatccagacagca | 4192 | tgctgtctggatgaaggag | 5583 | gaggacagctgggtccctg | 6974 | cagggacccagctgtcctc | 8364 |
| tccttcatccagacagcag | 4193 | ctgctgtctggatgaagga | 5584 | aggacagctgggtccctgt | 6975 | acagggacccagctgtcct | 8365 |
| ccttcatccagacagcaga | 4194 | tctgctgtctggatgaagg | 5585 | ggacagctgggtccctgtt | 6976 | aacagggacccagctgtcc | 8366 |
| cttcatccagacagcagat | 4195 | atctgctgtctggatgaag | 5586 | gacagctgggtccctgttg | 6977 | caacagggacccagctgtc | 8367 |
| ttcatccagacagcagatc | 4196 | gatctgctgtctggatgaa | 5587 | acagctgggtccctgttgc | 6978 | gcaacagggacccagctgt | 8368 |
| tcatccagacagcagatcg | 4197 | cgatctgctgtctggatga | 5588 | cagctgggtccctgttgct | 6979 | agcaacagggacccagctg | 8369 |
| catccagacagcagatcgc | 4198 | gcgatctgctgtctggatg | 5589 | agctgggtccctgttgctt | 6980 | aagcaacagggacccagct | 8370 |
| atccagacagcagatcgca | 4199 | tgcgatctgctgtctggat | 5590 | gctgggtccctgttgcttc | 6981 | gaagcaacagggacccagc | 8371 |
| tccagacagcagatcgcac | 4200 | gtgcgatctgctgtctgga | 5591 | ctgggtccctgttgcttcc | 6982 | ggaagcaacagggacccag | 8372 |
| ccagacagcagatcgcacc | 4201 | ggtgcgatctgctgtctgg | 5592 | tgggtccctgttgcttcct | 6983 | aggaagcaacagggaccca | 8373 |
| cagacagcagatcgcaccc | 4202 | gggtgcgatctgctgtctg | 5593 | gggtccctgttgcttcctg | 6984 | caggaagcaacagggaccc | 8374 |
| agacagcagatcgcaccct | 4203 | agggtgcgatctgctgtct | 5594 | ggtccctgttgcttcctgc | 6985 | gcaggaagcaacagggacc | 8375 |
| gacagcagatcgcaccctc | 4204 | gagggtgcgatctgctgtc | 5595 | gtccctgttgcttcctgcc | 6986 | ggcaggaagcaacagggac | 8376 |
| acagcagatcgcaccctcg | 4205 | cgagggtgcgatctgctgt | 5596 | tccctgttgcttcctgcct | 6987 | aggcaggaagcaacaggga | 8377 |
| cagcagatcgcaccctcgg | 4206 | ccgagggtgcgatctgctg | 5597 | ccctgttgcttcctgcctt | 6988 | aaggcaggaagcaacaggg | 8378 |
| agcagatcgcaccctcggt | 4207 | accgagggtgcgatctgct | 5598 | cctgttgcttcctgccttt | 6989 | aaaggcaggaagcaacagg | 8379 |
| gcagatcgcaccctcggtc | 4208 | gaccgagggtgcgatctgc | 5599 | ctgttgcttcctgcctttg | 6990 | caaaggcaggaagcaacag | 8380 |
| cagatcgcaccctcggtcc | 4209 | ggaccgagggtgcgatctg | 5600 | tgttgcttcctgcctttgt | 6991 | acaaaggcaggaagcaaca | 8381 |
| agatcgcaccctcggtcct | 4210 | aggaccgagggtgcgatct | 5601 | gttgcttcctgcctttgtc | 6992 | gacaaaggcaggaagcaac | 8382 |
| gatcgcaccctcggtcctt | 4211 | aaggaccgagggtgcgatc | 5602 | ttgcttcctgcctttgtca | 6993 | tgacaaaggcaggaagcaa | 8383 |
| atcgcaccctcggtcctta | 4212 | taaggaccgagggtgcgat | 5603 | tgcttcctgcctttgtcag | 6994 | ctgacaaaggcaggaagca | 8384 |
| tcgcaccctcggtccttag | 4213 | ctaaggaccgagggtgcga | 5604 | gcttcctgcctttgtcagc | 6995 | gctgacaaaggcaggaagc | 8385 |
| cgcaccctcggtccttaga | 4214 | tctaaggaccgagggtgcg | 5605 | cttcctgcctttgtcagcc | 6996 | ggctgacaaaggcaggaag | 8386 |
| gcaccctcggtccttagag | 4215 | ctctaaggaccgagggtgc | 5606 | ttcctgcctttgtcagcct | 6997 | aggctgacaaaggcaggaa | 8387 |
| caccctcggtccttagaga | 4216 | tctctaaggaccgagggtg | 5607 | tcctgcctttgtcagcctt | 6998 | aaggctgacaaaggcagga | 8388 |
| accctcggtccttagagaa | 4217 | ttctctaaggaccgagggt | 5608 | cctgcctttgtcagccttt | 6999 | aaaggctgacaaaggcagg | 8389 |
| ccctcggtccttagagaaa | 4218 | tttctctaaggaccgaggg | 5609 | ctgcctttgtcagcctttg | 7000 | caaaggctgacaaaggcag | 8390 |
| cctcggtccttagagaaaa | 4219 | ttttctctaaggaccgagg | 5610 | tgcctttgtcagcctttgg | 7001 | ccaaaggctgacaaaggca | 8391 |
| ctcggtccttagagaaaag | 4220 | cttttctctaaggaccgag | 5611 | gcctttgtcagcctttgga | 7002 | tccaaaggctgacaaaggc | 8392 |
| tcggtccttagagaaaagc | 4221 | gcttttctctaaggaccga | 5612 | cctttgtcagcctttggac | 7003 | gtccaaaggctgacaaagg | 8393 |
| cggtccttagagaaaagcg | 4222 | cgcttttctctaaggaccg | 5613 | ctttgtcagcctttggact | 7004 | agtccaaaggctgacaaag | 8394 |
| ggtccttagagaaaagcgc | 4223 | gcgcttttctctaaggacc | 5614 | tttgtcagcctttggactc | 7005 | gagtccaaaggctgacaaa | 8395 |
| gtccttagagaaaagcgcc | 4224 | ggcgcttttctctaaggac | 5615 | ttgtcagcctttggactct | 7006 | agagtccaaaggctgacaa | 8396 |
| tccttagagaaaagcgcct | 4225 | aggcgcttttctctaagga | 5616 | tgtcagcctttggactctc | 7007 | gagagtccaaaggctgaca | 8397 |
| ccttagagaaaagcgcctg | 4226 | caggcgcttttctctaagg | 5617 | gtcagcctttggactctcc | 7008 | ggagagtccaaaggctgac | 8398 |
| cttagagaaaagcgcctgg | 4227 | ccaggcgcttttctctaag | 5618 | tcagcctttggactctccc | 7009 | gggagagtccaaaggctga | 8399 |
| ttagagaaaagcgcctgga | 4228 | tccaggcgcttttctctaa | 5619 | cagcctttggactctccca | 7010 | tgggagagtccaaaggctg | 8400 |
| tagagaaaagcgcctggag | 4229 | ctccaggcgcttttctcta | 5620 | agcctttggactctcccac | 7011 | gtgggagagtccaaaggct | 8401 |
| agagaaaagcgcctggagg | 4230 | cctccaggcgcttttctct | 5621 | gcctttggactctcccaca | 7012 | tgtgggagagtccaaaggc | 8402 |
| gagaaaagcgcctggaggg | 4231 | ccctccaggcgcttttctc | 5622 | cctttggactctcccacat | 7013 | atgtgggagagtccaaagg | 8403 |
| agaaaagcgcctggagggc | 4232 | gccctccaggcgcttttct | 5623 | ctttggactctcccacatt | 7014 | aatgtgggagagtccaaag | 8404 |
| gaaaagcgcctggagggct | 4233 | agccctccaggcgcttttc | 5624 | tttggactctcccacattg | 7015 | caatgtgggagagtccaaa | 8405 |
| aaaagcgcctggagggctt | 4234 | aagccctccaggcgctttt | 5625 | ttggactctcccacattgg | 7016 | ccaatgtgggagagtccaa | 8406 |
| aaagcgcctggagggcttt | 4235 | aaagccctccaggcgcttt | 5626 | tggactctcccacattggc | 7017 | gccaatgtgggagagtcca | 8407 |
| aagcgcctggagggctttc | 4236 | gaaagccctccaggcgctt | 5627 | ggactctcccacattggcg | 7018 | cgccaatgtgggagagtcc | 8408 |
| agcgcctggagggctttca | 4237 | tgaaagccctccaggcgct | 5628 | gactctcccacattggcgc | 7019 | gcgccaatgtgggagagtc | 8409 |
| gcgcctggagggctttcaa | 4238 | ttgaaagccctccaggcgc | 5629 | actctcccacattggcgca | 7020 | tgcgccaatgtgggagagt | 8410 |
| cgcctggagggctttcaag | 4239 | cttgaaagccctccaggcg | 5630 | ctctcccacattggcgcat | 7021 | atgcgccaatgtgggagag | 8411 |
| gcctggagggctttcaagg | 4240 | ccttgaaagccctccaggc | 5631 | tctcccacattggcgcatc | 7022 | gatgcgccaatgtgggaga | 8412 |
| cctggagggctttcaagga | 4241 | tccttgaaagccctccagg | 5632 | ctcccacattggcgcatcc | 7023 | ggatgcgccaatgtgggag | 8413 |
| ctggagggctttcaaggag | 4242 | ctccttgaaagccctccag | 5633 | tcccacattggcgcatcct | 7024 | aggatgcgccaatgtggga | 8414 |
| tggagggctttcaaggagt | 4243 | actccttgaaagccctcca | 5634 | cccacattggcgcatcctc | 7025 | gaggatgcgccaatgtggg | 8415 |
| ggagggctttcaaggagtc | 4244 | gactccttgaaagccctcc | 5635 | ccacattggcgcatcctca | 7026 | tgaggatgcgccaatgtgg | 8416 |
| gagggctttcaaggagtca | 4245 | tgactccttgaaagccctc | 5636 | cacattggcgcatcctcag | 7027 | ctgaggatgcgccaatgtg | 8417 |
| agggctttcaaggagtcac | 4246 | gtgactccttgaaagccct | 5637 | acattggcgcatcctcaga | 7028 | tctgaggatgcgccaatgt | 8418 |
| gggctttcaaggagtcaca | 4247 | tgtgactccttgaaagccc | 5638 | cattggcgcatcctcagat | 7029 | atctgaggatgcgccaatg | 8419 |
| ggctttcaaggagtcacag | 4248 | ctgtgactccttgaaagcc | 5639 | attggcgcatcctcagata | 7030 | tatctgaggatgcgccaat | 8420 |
| gctttcaaggagtcacagt | 4249 | actgtgactccttgaaagc | 5640 | ttggcgcatcctcagatag | 7031 | ctatctgaggatgcgccaa | 8421 |
| ctttcaaggagtcacagtg | 4250 | cactgtgactccttgaaag | 5641 | tggcgcatcctcagataga | 7032 | tctatctgaggatgcgcca | 8422 |
| tttcaaggagtcacagtgt | 4251 | acactgtgactccttgaaa | 5642 | ggcgcatcctcagatagaa | 7033 | ttctatctgaggatgcgcc | 8423 |
| ttcaaggagtcacagtgtc | 4252 | gacactgtgactccttgaa | 5643 | gcgcatcctcagatagaag | 7034 | cttctatctgaggatgcgc | 8424 |
| tcaaggagtcacagtgtca | 4253 | tgacactgtgactccttga | 5644 | cgcatcctcagatagaaga | 7035 | tcttctatctgaggatgcg | 8425 |
| caaggagtcacagtgtcat | 4254 | atgacactgtgactccttg | 5645 | gcatcctcagatagaagac | 7036 | gtcttctatctgaggatgc | 8426 |
| aaggagtcacagtgtcatc | 4255 | gatgacactgtgactcctt | 5646 | catcctcagatagaagaca | 7037 | tgtcttctatctgaggatg | 8427 |
| aggagtcacagtgtcatca | 4256 | tgatgacactgtgactcct | 5647 | atcctcagatagaagacat | 7038 | atgtcttctatctgaggat | 8428 |
| ggagtcacagtgtcatcac | 4257 | gtgatgacactgtgactcc | 5648 | tcctcagatagaagacatt | 7039 | aatgtcttctatctgagga | 8429 |
| gagtcacagtgtcatcaca | 4258 | tgtgatgacactgtgactc | 5649 | cctcagatagaagacattt | 7040 | aaatgtcttctatctgagg | 8430 |
| agtcacagtgtcatcacat | 4259 | atgtgatgacactgtgact | 5650 | ctcagatagaagacatttc | 7041 | gaaatgtcttctatctgag | 8431 |
| gtcacagtgtcatcacatg | 4260 | catgtgatgacactgtgac | 5651 | tcagatagaagacatttcc | 7042 | ggaaatgtcttctatctga | 8432 |
| tcacagtgtcatcacatgc | 4261 | gcatgtgatgacactgtga | 5652 | cagatagaagacatttcct | 7043 | aggaaatgtcttctatctg | 8433 |
| cacagtgtcatcacatgct | 4262 | agcatgtgatgacactgtg | 5653 | agatagaagacatttcctg | 7044 | caggaaatgtcttctatct | 8434 |
| acagtgtcatcacatgctg | 4263 | cagcatgtgatgacactgt | 5654 | gatagaagacatttcctga | 7045 | tcaggaaatgtcttctatc | 8435 |
| cagtgtcatcacatgctga | 4264 | tcagcatgtgatgacactg | 5655 | atagaagacatttcctgaa | 7046 | ttcaggaaatgtcttctat | 8436 |
| agtgtcatcacatgctgaa | 4265 | ttcagcatgtgatgacact | 5656 | tagaagacatttcctgaac | 7047 | gttcaggaaatgtcttcta | 8437 |
| gtgtcatcacatgctgaag | 4266 | cttcagcatgtgatgacac | 5657 | agaagacatttcctgaacc | 7048 | ggttcaggaaatgtcttct | 8438 |
| tgtcatcacatgctgaagc | 4267 | gcttcagcatgtgatgaca | 5658 | gaagacatttcctgaacca | 7049 | tggttcaggaaatgtcttc | 8439 |
| gtcatcacatgctgaagca | 4268 | tgcttcagcatgtgatgac | 5659 | aagacatttcctgaaccaa | 7050 | ttggttcaggaaatgtctt | 8440 |
| tcatcacatgctgaagcat | 4269 | atgcttcagcatgtgatga | 5660 | agacatttcctgaaccaag | 7051 | cttggttcaggaaatgtct | 8441 |
| catcacatgctgaagcatc | 4270 | gatgcttcagcatgtgatg | 5661 | gacatttcctgaaccaaga | 7052 | tcttggttcaggaaatgtc | 8442 |
| atcacatgctgaagcatct | 4271 | agatgcttcagcatgtgat | 5662 | acatttcctgaaccaagac | 7053 | gtcttggttcaggaaatgt | 8443 |
| tcacatgctgaagcatctc | 4272 | gagatgcttcagcatgtga | 5663 | catttcctgaaccaagact | 7054 | agtcttggttcaggaaatg | 8444 |
| cacatgctgaagcatctcc | 4273 | ggagatgcttcagcatgtg | 5664 | atttcctgaaccaagactc | 7055 | gagtcttggttcaggaaat | 8445 |
| acatgctgaagcatctcca | 4274 | tggagatgcttcagcatgt | 5665 | tttcctgaaccaagactct | 7056 | agagtcttggttcaggaaa | 8446 |
| catgctgaagcatctccac | 4275 | gtggagatgcttcagcatg | 5666 | ttcctgaaccaagactctt | 7057 | aagagtcttggttcaggaa | 8447 |
| atgctgaagcatctccaca | 4276 | tgtggagatgcttcagcat | 5667 | tcctgaaccaagactcttt | 7058 | aaagagtcttggttcagga | 8448 |
| tgctgaagcatctccacaa | 4277 | ttgtggagatgcttcagca | 5668 | cctgaaccaagactcttta | 7059 | taaagagtcttggttcagg | 8449 |
| gctgaagcatctccacaac | 4278 | gttgtggagatgcttcagc | 5669 | ctgaaccaagactctttac | 7060 | gtaaagagtcttggttcag | 8450 |
| ctgaagcatctccacaacg | 4279 | cgttgtggagatgcttcag | 5670 | tgaaccaagactctttacc | 7061 | ggtaaagagtcttggttca | 8451 |
| tgaagcatctccacaacgg | 4280 | ccgttgtggagatgcttca | 5671 | gaaccaagactctttaccg | 7062 | cggtaaagagtcttggttc | 8452 |
| gaagcatctccacaacggt | 4281 | accgttgtggagatgcttc | 5672 | aaccaagactctttaccgt | 7063 | acggtaaagagtcttggtt | 8453 |
| aagcatctccacaacggtg | 4282 | caccgttgtggagatgctt | 5673 | accaagactctttaccgtg | 7064 | cacggtaaagagtcttggt | 8454 |
| agcatctccacaacggtgc | 4283 | gcaccgttgtggagatgct | 5674 | ccaagactctttaccgtgt | 7065 | acacggtaaagagtcttgg | 8455 |
| gcatctccacaacggtgcg | 4284 | cgcaccgttgtggagatgc | 5675 | caagactctttaccgtgta | 7066 | tacacggtaaagagtcttg | 8456 |
| catctccacaacggtgcgc | 4285 | gcgcaccgttgtggagatg | 5676 | aagactctttaccgtgtat | 7067 | atacacggtaaagagtctt | 8457 |
| atctccacaacggtgcgcg | 4286 | cgcgcaccgttgtggagat | 5677 | agactctttaccgtgtatg | 7068 | catacacggtaaagagtct | 8458 |
| tctccacaacggtgcgcgg | 4287 | ccgcgcaccgttgtggaga | 5678 | gactctttaccgtgtatga | 7069 | tcatacacggtaaagagtc | 8459 |
| ctccacaacggtgcgcgga | 4288 | tccgcgcaccgttgtggag | 5679 | actctttaccgtgtatgac | 7070 | gtcatacacggtaaagagt | 8460 |
| tccacaacggtgcgcggat | 4289 | atccgcgcaccgttgtgga | 5680 | ctctttaccgtgtatgact | 7071 | agtcatacacggtaaagag | 8461 |
| ccacaacggtgcgcggatc | 4290 | gatccgcgcaccgttgtgg | 5681 | tctttaccgtgtatgactt | 7072 | aagtcatacacggtaaaga | 8462 |
| cacaacggtgcgcggatca | 4291 | tgatccgcgcaccgttgtg | 5682 | ctttaccgtgtatgacttt | 7073 | aaagtcatacacggtaaag | 8463 |
| acaacggtgcgcggatcac | 4292 | gtgatccgcgcaccgttgt | 5683 | tttaccgtgtatgactttc | 7074 | gaaagtcatacacggtaaa | 8464 |
| caacggtgcgcggatcaca | 4293 | tgtgatccgcgcaccgttg | 5684 | ttaccgtgtatgactttcc | 7075 | ggaaagtcatacacggtaa | 8465 |
| aacggtgcgcggatcacag | 4294 | ctgtgatccgcgcaccgtt | 5685 | taccgtgtatgactttcct | 7076 | aggaaagtcatacacggta | 8466 |
| acggtgcgcggatcacagt | 4295 | actgtgatccgcgcaccgt | 5686 | accgtgtatgactttcctt | 7077 | aaggaaagtcatacacggt | 8467 |
| cggtgcgcggatcacagtg | 4296 | cactgtgatccgcgcaccg | 5687 | ccgtgtatgactttccttc | 7078 | gaaggaaagtcatacacgg | 8468 |
| ggtgcgcggatcacagtgc | 4297 | gcactgtgatccgcgcacc | 5688 | cgtgtatgactttccttca | 7079 | tgaaggaaagtcatacacg | 8469 |
| gtgcgcggatcacagtgca | 4298 | tgcactgtgatccgcgcac | 5689 | gtgtatgactttccttcac | 7080 | gtgaaggaaagtcatacac | 8470 |
| tgcgcggatcacagtgcag | 4299 | ctgcactgtgatccgcgca | 5690 | tgtatgactttccttcaca | 7081 | tgtgaaggaaagtcataca | 8471 |
| gcgcggatcacagtgcaga | 4300 | tctgcactgtgatccgcgc | 5691 | gtatgactttccttcacac | 7082 | gtgtgaaggaaagtcatac | 8472 |
| cgcggatcacagtgcagat | 4301 | atctgcactgtgatccgcg | 5692 | tatgactttccttcacaca | 7083 | tgtgtgaaggaaagtcata | 8473 |
| gcggatcacagtgcagatg | 4302 | catctgcactgtgatccgc | 5693 | atgactttccttcacacag | 7084 | ctgtgtgaaggaaagtcat | 8474 |
| cggatcacagtgcagatgc | 4303 | gcatctgcactgtgatccg | 5694 | tgactttccttcacacaga | 7085 | tctgtgtgaaggaaagtca | 8475 |
| ggatcacagtgcagatgcc | 4304 | ggcatctgcactgtgatcc | 5695 | gactttccttcacacagag | 7086 | ctctgtgtgaaggaaagtc | 8476 |
| gatcacagtgcagatgccc | 4305 | gggcatctgcactgtgatc | 5696 | actttccttcacacagaga | 7087 | tctctgtgtgaaggaaagt | 8477 |
| atcacagtgcagatgcccc | 4306 | ggggcatctgcactgtgat | 5697 | ctttccttcacacagagaa | 7088 | ttctctgtgtgaaggaaag | 8478 |
| tcacagtgcagatgccccc | 4307 | gggggcatctgcactgtga | 5698 | tttccttcacacagagaaa | 7089 | tttctctgtgtgaaggaaa | 8479 |
| cacagtgcagatgcccccg | 4308 | cgggggcatctgcactgtg | 5699 | ttccttcacacagagaaag | 7090 | ctttctctgtgtgaaggaa | 8480 |
| acagtgcagatgcccccga | 4309 | tcgggggcatctgcactgt | 5700 | tccttcacacagagaaagg | 7091 | cctttctctgtgtgaagga | 8481 |
| cagtgcagatgcccccgac | 4310 | gtcgggggcatctgcactg | 5701 | ccttcacacagagaaagga | 7092 | tcctttctctgtgtgaagg | 8482 |
| agtgcagatgcccccgacc | 4311 | ggtcgggggcatctgcact | 5702 | cttcacacagagaaaggac | 7093 | gtcctttctctgtgtgaag | 8483 |
| gtgcagatgcccccgacca | 4312 | tggtcgggggcatctgcac | 5703 | ttcacacagagaaaggaca | 7094 | tgtcctttctctgtgtgaa | 8484 |
| tgcagatgcccccgaccat | 4313 | atggtcgggggcatctgca | 5704 | tcacacagagaaaggacat | 7095 | atgtcctttctctgtgtga | 8485 |
| gcagatgcccccgaccatc | 4314 | gatggtcgggggcatctgc | 5705 | cacacagagaaaggacatt | 7096 | aatgtcctttctctgtgtg | 8486 |
| cagatgcccccgaccatcg | 4315 | cgatggtcgggggcatctg | 5706 | acacagagaaaggacattg | 7097 | caatgtcctttctctgtgt | 8487 |
| agatgcccccgaccatcga | 4316 | tcgatggtcgggggcatct | 5707 | cacagagaaaggacattga | 7098 | tcaatgtcctttctctgtg | 8488 |
| gatgcccccgaccatcgag | 4317 | ctcgatggtcgggggcatc | 5708 | acagagaaaggacattgat | 7099 | atcaatgtcctttctctgt | 8489 |
| atgcccccgaccatcgagg | 4318 | cctcgatggtcgggggcat | 5709 | cagagaaaggacattgatt | 7100 | aatcaatgtcctttctctg | 8490 |
| tgcccccgaccatcgaggg | 4319 | ccctcgatggtcgggggca | 5710 | agagaaaggacattgattc | 7101 | gaatcaatgtcctttctct | 8491 |
| gcccccgaccatcgagggc | 4320 | gccctcgatggtcgggggc | 5711 | gagaaaggacattgattct | 7102 | agaatcaatgtcctttctc | 8492 |
| cccccgaccatcgagggcc | 4321 | ggccctcgatggtcggggg | 5712 | agaaaggacattgattctt | 7103 | aagaatcaatgtcctttct | 8493 |
| ccccgaccatcgagggcca | 4322 | tggccctcgatggtcgggg | 5713 | gaaaggacattgattcttt | 7104 | aaagaatcaatgtcctttc | 8494 |
| cccgaccatcgagggccac | 4323 | gtggccctcgatggtcggg | 5714 | aaaggacattgattctttt | 7105 | aaaagaatcaatgtccttt | 8495 |
| ccgaccatcgagggccact | 4324 | agtggccctcgatggtcgg | 5715 | aaggacattgattcttttg | 7106 | caaaagaatcaatgtcctt | 8496 |
| cgaccatcgagggccactg | 4325 | cagtggccctcgatggtcg | 5716 | aggacattgattcttttga | 7107 | tcaaaagaatcaatgtcct | 8497 |
| gaccatcgagggccactgg | 4326 | ccagtggccctcgatggtc | 5717 | ggacattgattcttttgat | 7108 | atcaaaagaatcaatgtcc | 8498 |
| accatcgagggccactggg | 4327 | cccagtggccctcgatggt | 5718 | gacattgattcttttgatg | 7109 | catcaaaagaatcaatgtc | 8499 |
| ccatcgagggccactgggt | 4328 | acccagtggccctcgatgg | 5719 | acattgattcttttgatgc | 7110 | gcatcaaaagaatcaatgt | 8500 |
| catcgagggccactgggtg | 4329 | cacccagtggccctcgatg | 5720 | cattgattcttttgatgca | 7111 | tgcatcaaaagaatcaatg | 8501 |
| atcgagggccactgggtgt | 4330 | acacccagtggccctcgat | 5721 | attgattcttttgatgcac | 7112 | gtgcatcaaaagaatcaat | 8502 |
| tcgagggccactgggtgtc | 4331 | gacacccagtggccctcga | 5722 | ttgattcttttgatgcact | 7113 | agtgcatcaaaagaatcaa | 8503 |
| cgagggccactgggtgtcc | 4332 | ggacacccagtggccctcg | 5723 | tgattcttttgatgcactt | 7114 | aagtgcatcaaaagaatca | 8504 |
| gagggccactgggtgtcca | 4333 | tggacacccagtggccctc | 5724 | gattcttttgatgcacttg | 7115 | caagtgcatcaaaagaatc | 8505 |
| agggccactgggtgtccac | 4334 | gtggacacccagtggccct | 5725 | attcttttgatgcacttga | 7116 | tcaagtgcatcaaaagaat | 8506 |
| gggccactgggtgtccaca | 4335 | tgtggacacccagtggccc | 5726 | ttcttttgatgcacttgaa | 7117 | ttcaagtgcatcaaaagaa | 8507 |
| ggccactgggtgtccacag | 4336 | ctgtggacacccagtggcc | 5727 | tcttttgatgcacttgaat | 7118 | attcaagtgcatcaaaaga | 8508 |
| gccactgggtgtccacagg | 4337 | cctgtggacacccagtggc | 5728 | cttttgatgcacttgaatg | 7119 | cattcaagtgcatcaaaag | 8509 |
| ccactgggtgtccacaggc | 4338 | gcctgtggacacccagtgg | 5729 | ttttgatgcacttgaatgc | 7120 | gcattcaagtgcatcaaaa | 8510 |
| cactgggtgtccacaggct | 4339 | agcctgtggacacccagtg | 5730 | tttgatgcacttgaatgcc | 7121 | ggcattcaagtgcatcaaa | 8511 |
| actgggtgtccacaggctg | 4340 | cagcctgtggacacccagt | 5731 | ttgatgcacttgaatgcct | 7122 | aggcattcaagtgcatcaa | 8512 |
| ctgggtgtccacaggctgt | 4341 | acagcctgtggacacccag | 5732 | tgatgcacttgaatgcctt | 7123 | aaggcattcaagtgcatca | 8513 |
| tgggtgtccacaggctgtg | 4342 | cacagcctgtggacaccca | 5733 | gatgcacttgaatgccttg | 7124 | caaggcattcaagtgcatc | 8514 |
| gggtgtccacaggctgtga | 4343 | tcacagcctgtggacaccc | 5734 | atgcacttgaatgccttga | 7125 | tcaaggcattcaagtgcat | 8515 |
| ggtgtccacaggctgtgaa | 4344 | ttcacagcctgtggacacc | 5735 | tgcacttgaatgccttgag | 7126 | ctcaaggcattcaagtgca | 8516 |
| gtgtccacaggctgtgaag | 4345 | cttcacagcctgtggacac | 5736 | gcacttgaatgccttgaga | 7127 | tctcaaggcattcaagtgc | 8517 |
| tgtccacaggctgtgaagt | 4346 | acttcacagcctgtggaca | 5737 | cacttgaatgccttgagac | 7128 | gtctcaaggcattcaagtg | 8518 |
| gtccacaggctgtgaagta | 4347 | tacttcacagcctgtggac | 5738 | acttgaatgccttgagacc | 7129 | ggtctcaaggcattcaagt | 8519 |
| tccacaggctgtgaagtaa | 4348 | ttacttcacagcctgtgga | 5739 | cttgaatgccttgagacct | 7130 | aggtctcaaggcattcaag | 8520 |
| ccacaggctgtgaagtaag | 4349 | cttacttcacagcctgtgg | 5740 | ttgaatgccttgagacctg | 7131 | caggtctcaaggcattcaa | 8521 |
| cacaggctgtgaagtaagg | 4350 | ccttacttcacagcctgtg | 5741 | tgaatgccttgagacctgc | 7132 | gcaggtctcaaggcattca | 8522 |
| acaggctgtgaagtaaggt | 4351 | accttacttcacagcctgt | 5742 | gaatgccttgagacctgcc | 7133 | ggcaggtctcaaggcattc | 8523 |
| caggctgtgaagtaaggtc | 4352 | gaccttacttcacagcctg | 5743 | aatgccttgagacctgccg | 7134 | cggcaggtctcaaggcatt | 8524 |
| aggctgtgaagtaaggtcg | 4353 | cgaccttacttcacagcct | 5744 | atgccttgagacctgccgt | 7135 | acggcaggtctcaaggcat | 8525 |
| ggctgtgaagtaaggtcgg | 4354 | ccgaccttacttcacagcc | 5745 | tgccttgagacctgccgtt | 7136 | aacggcaggtctcaaggca | 8526 |
| gctgtgaagtaaggtcggg | 4355 | cccgaccttacttcacagc | 5746 | gccttgagacctgccgttg | 7137 | caacggcaggtctcaaggc | 8527 |
| ctgtgaagtaaggtcgggt | 4356 | acccgaccttacttcacag | 5747 | ccttgagacctgccgttgc | 7138 | gcaacggcaggtctcaagg | 8528 |
| tgtgaagtaaggtcgggtc | 4357 | gacccgaccttacttcaca | 5748 | cttgagacctgccgttgcc | 7139 | ggcaacggcaggtctcaag | 8529 |
| gtgaagtaaggtcgggtcc | 4358 | ggacccgaccttacttcac | 5749 | ttgagacctgccgttgcct | 7140 | aggcaacggcaggtctcaa | 8530 |
| tgaagtaaggtcgggtccg | 4359 | cggacccgaccttacttca | 5750 | tgagacctgccgttgcctc | 7141 | gaggcaacggcaggtctca | 8531 |
| gaagtaaggtcgggtccgg | 4360 | ccggacccgaccttacttc | 5751 | gagacctgccgttgcctct | 7142 | agaggcaacggcaggtctc | 8532 |
| aagtaaggtcgggtccgga | 4361 | tccggacccgaccttactt | 5752 | agacctgccgttgcctctc | 7143 | gagaggcaacggcaggtct | 8533 |
| agtaaggtcgggtccggag | 4362 | ctccggacccgaccttact | 5753 | gacctgccgttgcctctcc | 7144 | ggagaggcaacggcaggtc | 8534 |
| gtaaggtcgggtccggagt | 4363 | actccggacccgaccttac | 5754 | acctgccgttgcctctcct | 7145 | aggagaggcaacggcaggt | 8535 |
| taaggtcgggtccggagtt | 4364 | aactccggacccgacctta | 5755 | cctgccgttgcctctcctc | 7146 | gaggagaggcaacggcagg | 8536 |
| aaggtcgggtccggagttc | 4365 | gaactccggacccgacctt | 5756 | ctgccgttgcctctcctct | 7147 | agaggagaggcaacggcag | 8537 |
| aggtcgggtccggagttca | 4366 | tgaactccggacccgacct | 5757 | tgccgttgcctctcctctc | 7148 | gagaggagaggcaacggca | 8538 |
| ggtcgggtccggagttcat | 4367 | atgaactccggacccgacc | 5758 | gccgttgcctctcctctcc | 7149 | ggagaggagaggcaacggc | 8539 |
| gtcgggtccggagttcatg | 4368 | catgaactccggacccgac | 5759 | ccgttgcctctcctctccc | 7150 | gggagaggagaggcaacgg | 8540 |
| tcgggtccggagttcatga | 4369 | tcatgaactccggacccga | 5760 | cgttgcctctcctctcccc | 7151 | ggggagaggagaggcaacg | 8541 |
| cgggtccggagttcatgac | 4370 | gtcatgaactccggacccg | 5761 | gttgcctctcctctcccca | 7152 | tggggagaggagaggcaac | 8542 |
| gggtccggagttcatgaca | 4371 | tgtcatgaactccggaccc | 5762 | ttgcctctcctctccccac | 7153 | gtggggagaggagaggcaa | 8543 |
| ggtccggagttcatgacaa | 4372 | ttgtcatgaactccggacc | 5763 | tgcctctcctctccccacc | 7154 | ggtggggagaggagaggca | 8544 |
| gtccggagttcatgacaag | 4373 | cttgtcatgaactccggac | 5764 | gcctctcctctccccacct | 7155 | aggtggggagaggagaggc | 8545 |
| tccggagttcatgacaagg | 4374 | ccttgtcatgaactccgga | 5765 | cctctcctctccccacctc | 7156 | gaggtggggagaggagagg | 8546 |
| ccggagttcatgacaaggt | 4375 | accttgtcatgaactccgg | 5766 | ctctcctctccccacctct | 7157 | agaggtggggagaggagag | 8547 |
| cggagttcatgacaaggtc | 4376 | gaccttgtcatgaactccg | 5767 | tctcctctccccacctctt | 7158 | aagaggtggggagaggaga | 8548 |
| ggagttcatgacaaggtct | 4377 | agaccttgtcatgaactcc | 5768 | ctcctctccccacctcttc | 7159 | gaagaggtggggagaggag | 8549 |
| gagttcatgacaaggtctt | 4378 | aagaccttgtcatgaactc | 5769 | tcctctccccacctcttcc | 7160 | ggaagaggtggggagagga | 8550 |
| agttcatgacaaggtctta | 4379 | taagaccttgtcatgaact | 5770 | cctctccccacctcttcca | 7161 | tggaagaggtggggagagg | 8551 |
| gttcatgacaaggtcttac | 4380 | gtaagaccttgtcatgaac | 5771 | ctctccccacctcttccag | 7162 | ctggaagaggtggggagag | 8552 |
| ttcatgacaaggtcttaca | 4381 | tgtaagaccttgtcatgaa | 5772 | tctccccacctcttccagc | 7163 | gctggaagaggtggggaga | 8553 |
| tcatgacaaggtcttacag | 4382 | ctgtaagaccttgtcatga | 5773 | ctccccacctcttccagcc | 7164 | ggctggaagaggtggggag | 8554 |
| catgacaaggtcttacagg | 4383 | cctgtaagaccttgtcatg | 5774 | tccccacctcttccagcct | 7165 | aggctggaagaggtgggga | 8555 |
| atgacaaggtcttacaggt | 4384 | acctgtaagaccttgtcat | 5775 | ccccacctcttccagcctc | 7166 | gaggctggaagaggtgggg | 8556 |
| tgacaaggtcttacaggtt | 4385 | aacctgtaagaccttgtca | 5776 | cccacctcttccagcctct | 7167 | agaggctggaagaggtggg | 8557 |
| gacaaggtcttacaggttc | 4386 | gaacctgtaagaccttgtc | 5777 | ccacctcttccagcctctg | 7168 | cagaggctggaagaggtgg | 8558 |
| acaaggtcttacaggttct | 4387 | agaacctgtaagaccttgt | 5778 | cacctcttccagcctctgc | 7169 | gcagaggctggaagaggtg | 8559 |
| caaggtcttacaggttcta | 4388 | tagaacctgtaagaccttg | 5779 | acctcttccagcctctgcg | 7170 | cgcagaggctggaagaggt | 8560 |
| aaggtcttacaggttctac | 4389 | gtagaacctgtaagacctt | 5780 | cctcttccagcctctgcgc | 7171 | gcgcagaggctggaagagg | 8561 |
| aggtcttacaggttctaca | 4390 | tgtagaacctgtaagacct | 5781 | ctcttccagcctctgcgcc | 7172 | ggcgcagaggctggaagag | 8562 |
| ggtcttacaggttctacaa | 4391 | ttgtagaacctgtaagacc | 5782 | tcttccagcctctgcgcca | 7173 | tggcgcagaggctggaaga | 8563 |
| gtcttacaggttctacaac | 4392 | gttgtagaacctgtaagac | 5783 | cttccagcctctgcgccat | 7174 | atggcgcagaggctggaag | 8564 |
| tcttacaggttctacaaca | 4393 | tgttgtagaacctgtaaga | 5784 | ttccagcctctgcgccatg | 7175 | catggcgcagaggctggaa | 8565 |
| cttacaggttctacaacaa | 4394 | ttgttgtagaacctgtaag | 5785 | tccagcctctgcgccatga | 7176 | tcatggcgcagaggctgga | 8566 |
| ttacaggttctacaacaat | 4395 | attgttgtagaacctgtaa | 5786 | ccagcctctgcgccatgag | 7177 | ctcatggcgcagaggctgg | 8567 |
| tacaggttctacaacaata | 4396 | tattgttgtagaacctgta | 5787 | cagcctctgcgccatgagc | 7178 | gctcatggcgcagaggctg | 8568 |
| acaggttctacaacaataa | 4397 | ttattgttgtagaacctgt | 5788 | agcctctgcgccatgagca | 7179 | tgctcatggcgcagaggct | 8569 |
| caggttctacaacaataat | 4398 | attattgttgtagaacctg | 5789 | gcctctgcgccatgagcag | 7180 | ctgctcatggcgcagaggc | 8570 |
| aggttctacaacaataata | 4399 | tattattgttgtagaacct | 5790 | cctctgcgccatgagcagt | 7181 | actgctcatggcgcagagg | 8571 |
| ggttctacaacaataatac | 4400 | gtattattgttgtagaacc | 5791 | ctctgcgccatgagcagtg | 7182 | cactgctcatggcgcagag | 8572 |
| gttctacaacaataatacc | 4401 | ggtattattgttgtagaac | 5792 | tctgcgccatgagcagtgt | 7183 | acactgctcatggcgcaga | 8573 |
| ttctacaacaataatacct | 4402 | aggtattattgttgtagaa | 5793 | ctgcgccatgagcagtgtg | 7184 | cacactgctcatggcgcag | 8574 |
| tctacaacaataatacctt | 4403 | aaggtattattgttgtaga | 5794 | tgcgccatgagcagtgtgt | 7185 | acacactgctcatggcgca | 8575 |
| ctacaacaataataccttc | 4404 | gaaggtattattgttgtag | 5795 | gcgccatgagcagtgtgtt | 7186 | aacacactgctcatggcgc | 8576 |
| tacaacaataataccttca | 4405 | tgaaggtattattgttgta | 5796 | cgccatgagcagtgtgttt | 7187 | aaacacactgctcatggcg | 8577 |
| acaacaataataccttcaa | 4406 | ttgaaggtattattgttgt | 5797 | gccatgagcagtgtgtttg | 7188 | caaacacactgctcatggc | 8578 |
| caacaataataccttcaag | 4407 | cttgaaggtattattgttg | 5798 | ccatgagcagtgtgtttga | 7189 | tcaaacacactgctcatgg | 8579 |
| aacaataataccttcaagg | 4408 | ccttgaaggtattattgtt | 5799 | catgagcagtgtgtttgaa | 7190 | ttcaaacacactgctcatg | 8580 |
| acaataataccttcaaggc | 4409 | gccttgaaggtattattgt | 5800 | atgagcagtgtgtttgaag | 7191 | cttcaaacacactgctcat | 8581 |
| caataataccttcaaggcc | 4410 | ggccttgaaggtattattg | 5801 | tgagcagtgtgtttgaagt | 7192 | acttcaaacacactgctca | 8582 |
| aataataccttcaaggcct | 4411 | aggccttgaaggtattatt | 5802 | gagcagtgtgtttgaagtt | 7193 | aacttcaaacacactgctc | 8583 |
| ataataccttcaaggccta | 4412 | taggccttgaaggtattat | 5803 | agcagtgtgtttgaagttt | 7194 | aaacttcaaacacactgct | 8584 |
| taataccttcaaggcctac | 4413 | gtaggccttgaaggtatta | 5804 | gcagtgtgtttgaagtttc | 7195 | gaaacttcaaacacactgc | 8585 |
| aataccttcaaggcctacc | 4414 | ggtaggccttgaaggtatt | 5805 | cagtgtgtttgaagtttca | 7196 | tgaaacttcaaacacactg | 8586 |
| ataccttcaaggcctacca | 4415 | tggtaggccttgaaggtat | 5806 | agtgtgtttgaagtttcag | 7197 | ctgaaacttcaaacacact | 8587 |
| taccttcaaggcctaccag | 4416 | ctggtaggccttgaaggta | 5807 | gtgtgtttgaagtttcagc | 7198 | gctgaaacttcaaacacac | 8588 |
| accttcaaggcctaccagt | 4417 | actggtaggccttgaaggt | 5808 | tgtgtttgaagtttcagct | 7199 | agctgaaacttcaaacaca | 8589 |
| ccttcaaggcctaccagtt | 4418 | aactggtaggccttgaagg | 5809 | gtgtttgaagtttcagctt | 7200 | aagctgaaacttcaaacac | 8590 |
| cttcaaggcctaccagttt | 4419 | aaactggtaggccttgaag | 5810 | tgtttgaagtttcagcttt | 7201 | aaagctgaaacttcaaaca | 8591 |
| ttcaaggcctaccagtttt | 4420 | aaaactggtaggccttgaa | 5811 | gtttgaagtttcagctttg | 7202 | caaagctgaaacttcaaac | 8592 |
| tcaaggcctaccagtttta | 4421 | taaaactggtaggccttga | 5812 | tttgaagtttcagctttga | 7203 | tcaaagctgaaacttcaaa | 8593 |
| caaggcctaccagttttac | 4422 | gtaaaactggtaggccttg | 5813 | ttgaagtttcagctttgaa | 7204 | ttcaaagctgaaacttcaa | 8594 |
| aaggcctaccagttttact | 4423 | agtaaaactggtaggcctt | 5814 | tgaagtttcagctttgaat | 7205 | attcaaagctgaaacttca | 8595 |
| aggcctaccagttttacta | 4424 | tagtaaaactggtaggcct | 5815 | gaagtttcagctttgaatg | 7206 | cattcaaagctgaaacttc | 8596 |
| ggcctaccagttttactat | 4425 | atagtaaaactggtaggcc | 5816 | aagtttcagctttgaatgt | 7207 | acattcaaagctgaaactt | 8597 |
| gcctaccagttttactatg | 4426 | catagtaaaactggtaggc | 5817 | agtttcagctttgaatgtc | 7208 | gacattcaaagctgaaact | 8598 |
| cctaccagttttactatgg | 4427 | ccatagtaaaactggtagg | 5818 | gtttcagctttgaatgtct | 7209 | agacattcaaagctgaaac | 8599 |
| ctaccagttttactatggc | 4428 | gccatagtaaaactggtag | 5819 | tttcagctttgaatgtctt | 7210 | aagacattcaaagctgaaa | 8600 |
| taccagttttactatggca | 4429 | tgccatagtaaaactggta | 5820 | ttcagctttgaatgtcttc | 7211 | gaagacattcaaagctgaa | 8601 |
| accagttttactatggcag | 4430 | ctgccatagtaaaactggt | 5821 | tcagctttgaatgtcttcc | 7212 | ggaagacattcaaagctga | 8602 |
| ccagttttactatggcagc | 4431 | gctgccatagtaaaactgg | 5822 | cagctttgaatgtcttccc | 7213 | gggaagacattcaaagctg | 8603 |
| cagttttactatggcagca | 4432 | tgctgccatagtaaaactg | 5823 | agctttgaatgtcttcccg | 7214 | cgggaagacattcaaagct | 8604 |
| agttttactatggcagcaa | 4433 | ttgctgccatagtaaaact | 5824 | gctttgaatgtcttcccgc | 7215 | gcgggaagacattcaaagc | 8605 |
| gttttactatggcagcaac | 4434 | gttgctgccatagtaaaac | 5825 | ctttgaatgtcttcccgcc | 7216 | ggcgggaagacattcaaag | 8606 |
| ttttactatggcagcaacc | 4435 | ggttgctgccatagtaaaa | 5826 | tttgaatgtcttcccgccc | 7217 | gggcgggaagacattcaaa | 8607 |
| tttactatggcagcaaccg | 4436 | cggttgctgccatagtaaa | 5827 | ttgaatgtcttcccgcccg | 7218 | cgggcgggaagacattcaa | 8608 |
| ttactatggcagcaaccgc | 4437 | gcggttgctgccatagtaa | 5828 | tgaatgtcttcccgcccga | 7219 | tcgggcgggaagacattca | 8609 |
| tactatggcagcaaccgct | 4438 | agcggttgctgccatagta | 5829 | gaatgtcttcccgcccgat | 7220 | atcgggcgggaagacattc | 8610 |
| actatggcagcaaccgctg | 4439 | cagcggttgctgccatagt | 5830 | aatgtcttcccgcccgatc | 7221 | gatcgggcgggaagacatt | 8611 |
| ctatggcagcaaccgctgt | 4440 | acagcggttgctgccatag | 5831 | atgtcttcccgcccgatcc | 7222 | ggatcgggcgggaagacat | 8612 |
| tatggcagcaaccgctgta | 4441 | tacagcggttgctgccata | 5832 | tgtcttcccgcccgatccg | 7223 | cggatcgggcgggaagaca | 8613 |
| atggcagcaaccgctgtac | 4442 | gtacagcggttgctgccat | 5833 | gtcttcccgcccgatccgt | 7224 | acggatcgggcgggaagac | 8614 |
| tggcagcaaccgctgtaca | 4443 | tgtacagcggttgctgcca | 5834 | tcttcccgcccgatccgtg | 7225 | cacggatcgggcgggaaga | 8615 |
| ggcagcaaccgctgtacaa | 4444 | ttgtacagcggttgctgcc | 5835 | cttcccgcccgatccgtgg | 7226 | ccacggatcgggcgggaag | 8616 |
| gcagcaaccgctgtacaaa | 4445 | tttgtacagcggttgctgc | 5836 | ttcccgcccgatccgtggc | 7227 | gccacggatcgggcgggaa | 8617 |
| cagcaaccgctgtacaaac | 4446 | gtttgtacagcggttgctg | 5837 | tcccgcccgatccgtggcc | 7228 | ggccacggatcgggcggga | 8618 |
| agcaaccgctgtacaaacc | 4447 | ggtttgtacagcggttgct | 5838 | cccgcccgatccgtggcct | 7229 | aggccacggatcgggcggg | 8619 |
| gcaaccgctgtacaaaccc | 4448 | gggtttgtacagcggttgc | 5839 | ccgcccgatccgtggcctg | 7230 | caggccacggatcgggcgg | 8620 |
| caaccgctgtacaaacccc | 4449 | ggggtttgtacagcggttg | 5840 | cgcccgatccgtggcctga | 7231 | tcaggccacggatcgggcg | 8621 |
| aaccgctgtacaaacccca | 4450 | tggggtttgtacagcggtt | 5841 | gcccgatccgtggcctgag | 7232 | ctcaggccacggatcgggc | 8622 |
| accgctgtacaaaccccac | 4451 | gtggggtttgtacagcggt | 5842 | cccgatccgtggcctgaga | 7233 | tctcaggccacggatcggg | 8623 |
| ccgctgtacaaaccccacc | 4452 | ggtggggtttgtacagcgg | 5843 | ccgatccgtggcctgagaa | 7234 | ttctcaggccacggatcgg | 8624 |
| cgctgtacaaaccccacct | 4453 | aggtggggtttgtacagcg | 5844 | cgatccgtggcctgagaac | 7235 | gttctcaggccacggatcg | 8625 |
| gctgtacaaaccccaccta | 4454 | taggtggggtttgtacagc | 5845 | gatccgtggcctgagaact | 7236 | agttctcaggccacggatc | 8626 |
| ctgtacaaaccccacctac | 4455 | gtaggtggggtttgtacag | 5846 | atccgtggcctgagaactt | 7237 | aagttctcaggccacggat | 8627 |
| tgtacaaaccccacctaca | 4456 | tgtaggtggggtttgtaca | 5847 | tccgtggcctgagaacttc | 7238 | gaagttctcaggccacgga | 8628 |
| gtacaaaccccacctacac | 4457 | gtgtaggtggggtttgtac | 5848 | ccgtggcctgagaacttca | 7239 | tgaagttctcaggccacgg | 8629 |
| tacaaaccccacctacacc | 4458 | ggtgtaggtggggtttgta | 5849 | cgtggcctgagaacttcat | 7240 | atgaagttctcaggccacg | 8630 |
| acaaaccccacctacaccc | 4459 | gggtgtaggtggggtttgt | 5850 | gtggcctgagaacttcata | 7241 | tatgaagttctcaggccac | 8631 |
| caaaccccacctacaccct | 4460 | agggtgtaggtggggtttg | 5851 | tggcctgagaacttcatag | 7242 | ctatgaagttctcaggcca | 8632 |
| aaaccccacctacaccctc | 4461 | gagggtgtaggtggggttt | 5852 | ggcctgagaacttcataga | 7243 | tctatgaagttctcaggcc | 8633 |
| aaccccacctacaccctca | 4462 | tgagggtgtaggtggggtt | 5853 | gcctgagaacttcatagag | 7244 | ctctatgaagttctcaggc | 8634 |
| accccacctacaccctcat | 4463 | atgagggtgtaggtggggt | 5854 | cctgagaacttcatagagg | 7245 | cctctatgaagttctcagg | 8635 |
| ccccacctacaccctcatc | 4464 | gatgagggtgtaggtgggg | 5855 | ctgagaacttcatagaggt | 7246 | acctctatgaagttctcag | 8636 |
| cccacctacaccctcatca | 4465 | tgatgagggtgtaggtggg | 5856 | tgagaacttcatagaggtg | 7247 | cacctctatgaagttctca | 8637 |
| ccacctacaccctcatcat | 4466 | atgatgagggtgtaggtgg | 5857 | gagaacttcatagaggtgt | 7248 | acacctctatgaagttctc | 8638 |
| cacctacaccctcatcatc | 4467 | gatgatgagggtgtaggtg | 5858 | agaacttcatagaggtgtg | 7249 | cacacctctatgaagttct | 8639 |
| acctacaccctcatcatcc | 4468 | ggatgatgagggtgtaggt | 5859 | gaacttcatagaggtgtga | 7250 | tcacacctctatgaagttc | 8640 |
| cctacaccctcatcatccg | 4469 | cggatgatgagggtgtagg | 5860 | aacttcatagaggtgtgat | 7251 | atcacacctctatgaagtt | 8641 |
| ctacaccctcatcatccga | 4470 | tcggatgatgagggtgtag | 5861 | acttcatagaggtgtgatt | 7252 | aatcacacctctatgaagt | 8642 |
| tacaccctcatcatccgag | 4471 | ctcggatgatgagggtgta | 5862 | cttcatagaggtgtgattg | 7253 | caatcacacctctatgaag | 8643 |
| acaccctcatcatccgagg | 4472 | cctcggatgatgagggtgt | 5863 | ttcatagaggtgtgattgc | 7254 | gcaatcacacctctatgaa | 8644 |
| caccctcatcatccgaggc | 4473 | gcctcggatgatgagggtg | 5864 | tcatagaggtgtgattgca | 7255 | tgcaatcacacctctatga | 8645 |
| accctcatcatccgaggca | 4474 | tgcctcggatgatgagggt | 5865 | catagaggtgtgattgcac | 7256 | gtgcaatcacacctctatg | 8646 |
| ccctcatcatccgaggcaa | 4475 | ttgcctcggatgatgaggg | 5866 | atagaggtgtgattgcact | 7257 | agtgcaatcacacctctat | 8647 |
| cctcatcatccgaggcaag | 4476 | cttgcctcggatgatgagg | 5867 | tagaggtgtgattgcactt | 7258 | aagtgcaatcacacctcta | 8648 |
| ctcatcatccgaggcaaga | 4477 | tcttgcctcggatgatgag | 5868 | agaggtgtgattgcacttt | 7259 | aaagtgcaatcacacctct | 8649 |
| tcatcatccgaggcaagat | 4478 | atcttgcctcggatgatga | 5869 | gaggtgtgattgcacttta | 7260 | taaagtgcaatcacacctc | 8650 |
| catcatccgaggcaagatc | 4479 | gatcttgcctcggatgatg | 5870 | aggtgtgattgcactttat | 7261 | ataaagtgcaatcacacct | 8651 |
| atcatccgaggcaagatcc | 4480 | ggatcttgcctcggatgat | 5871 | ggtgtgattgcactttatg | 7262 | cataaagtgcaatcacacc | 8652 |
| tcatccgaggcaagatccg | 4481 | cggatcttgcctcggatga | 5872 | gtgtgattgcactttatgt | 7263 | acataaagtgcaatcacac | 8653 |
| catccgaggcaagatccgg | 4482 | ccggatcttgcctcggatg | 5873 | tgtgattgcactttatgtc | 7264 | gacataaagtgcaatcaca | 8654 |
| atccgaggcaagatccggc | 4483 | gccggatcttgcctcggat | 5874 | gtgattgcactttatgtct | 7265 | agacataaagtgcaatcac | 8655 |
| tccgaggcaagatccggct | 4484 | agccggatcttgcctcgga | 5875 | tgattgcactttatgtctg | 7266 | cagacataaagtgcaatca | 8656 |
| ccgaggcaagatccggctt | 4485 | aagccggatcttgcctcgg | 5876 | gattgcactttatgtctgc | 7267 | gcagacataaagtgcaatc | 8657 |
| cgaggcaagatccggcttc | 4486 | gaagccggatcttgcctcg | 5877 | attgcactttatgtctgca | 7268 | tgcagacataaagtgcaat | 8658 |
| gaggcaagatccggcttcg | 4487 | cgaagccggatcttgcctc | 5878 | ttgcactttatgtctgcag | 7269 | ctgcagacataaagtgcaa | 8659 |
| aggcaagatccggcttcgc | 4488 | gcgaagccggatcttgcct | 5879 | tgcactttatgtctgcaga | 7270 | tctgcagacataaagtgca | 8660 |
| ggcaagatccggcttcgcc | 4489 | ggcgaagccggatcttgcc | 5880 | gcactttatgtctgcagag | 7271 | ctctgcagacataaagtgc | 8661 |
| gcaagatccggcttcgcca | 4490 | tggcgaagccggatcttgc | 5881 | cactttatgtctgcagaga | 7272 | tctctgcagacataaagtg | 8662 |
| caagatccggcttcgccag | 4491 | ctggcgaagccggatcttg | 5882 | actttatgtctgcagagag | 7273 | ctctctgcagacataaagt | 8663 |
| aagatccggcttcgccagg | 4492 | cctggcgaagccggatctt | 5883 | ctttatgtctgcagagagc | 7274 | gctctctgcagacataaag | 8664 |
| agatccggcttcgccaggc | 4493 | gcctggcgaagccggatct | 5884 | tttatgtctgcagagagct | 7275 | agctctctgcagacataaa | 8665 |
| gatccggcttcgccaggcg | 4494 | cgcctggcgaagccggatc | 5885 | ttatgtctgcagagagctg | 7276 | cagctctctgcagacataa | 8666 |
| atccggcttcgccaggcgt | 4495 | acgcctggcgaagccggat | 5886 | tatgtctgcagagagctgg | 7277 | ccagctctctgcagacata | 8667 |
| tccggcttcgccaggcgtc | 4496 | gacgcctggcgaagccgga | 5887 | atgtctgcagagagctggg | 7278 | cccagctctctgcagacat | 8668 |
| ccggcttcgccaggcgtcc | 4497 | ggacgcctggcgaagccgg | 5888 | tgtctgcagagagctgggg | 7279 | ccccagctctctgcagaca | 8669 |
| cggcttcgccaggcgtcct | 4498 | aggacgcctggcgaagccg | 5889 | gtctgcagagagctggggc | 7280 | gccccagctctctgcagac | 8670 |
| ggcttcgccaggcgtcctg | 4499 | caggacgcctggcgaagcc | 5890 | tctgcagagagctggggcg | 7281 | cgccccagctctctgcaga | 8671 |
| gcttcgccaggcgtcctgg | 4500 | ccaggacgcctggcgaagc | 5891 | ctgcagagagctggggcga | 7282 | tcgccccagctctctgcag | 8672 |
| cttcgccaggcgtcctgga | 4501 | tccaggacgcctggcgaag | 5892 | tgcagagagctggggcgag | 7283 | ctcgccccagctctctgca | 8673 |
| ttcgccaggcgtcctggat | 4502 | atccaggacgcctggcgaa | 5893 | gcagagagctggggcgagt | 7284 | actcgccccagctctctgc | 8674 |
| tcgccaggcgtcctggatc | 4503 | gatccaggacgcctggcga | 5894 | cagagagctggggcgagtg | 7285 | cactcgccccagctctctg | 8675 |
| cgccaggcgtcctggatca | 4504 | tgatccaggacgcctggcg | 5895 | agagagctggggcgagtgt | 7286 | acactcgccccagctctct | 8676 |
| gccaggcgtcctggatcat | 4505 | atgatccaggacgcctggc | 5896 | gagagctggggcgagtgtg | 7287 | cacactcgccccagctctc | 8677 |
| ccaggcgtcctggatcatc | 4506 | gatgatccaggacgcctgg | 5897 | agagctggggcgagtgtgt | 7288 | acacactcgccccagctct | 8678 |
| caggcgtcctggatcatcc | 4507 | ggatgatccaggacgcctg | 5898 | gagctggggcgagtgtgtt | 7289 | aacacactcgccccagctc | 8679 |
| aggcgtcctggatcatccg | 4508 | cggatgatccaggacgcct | 5899 | agctggggcgagtgtgttt | 7290 | aaacacactcgccccagct | 8680 |
| ggcgtcctggatcatccgt | 4509 | acggatgatccaggacgcc | 5900 | gctggggcgagtgtgttta | 7291 | taaacacactcgccccagc | 8681 |
| gcgtcctggatcatccgtg | 4510 | cacggatgatccaggacgc | 5901 | ctggggcgagtgtgtttag | 7292 | ctaaacacactcgccccag | 8682 |
| cgtcctggatcatccgtgg | 4511 | ccacggatgatccaggacg | 5902 | tggggcgagtgtgtttagg | 7293 | cctaaacacactcgcccca | 8683 |
| gtcctggatcatccgtggg | 4512 | cccacggatgatccaggac | 5903 | ggggcgagtgtgtttaggg | 7294 | ccctaaacacactcgcccc | 8684 |
| tcctggatcatccgtgggg | 4513 | ccccacggatgatccagga | 5904 | gggcgagtgtgtttagggg | 7295 | cccctaaacacactcgccc | 8685 |
| cctggatcatccgtggggg | 4514 | cccccacggatgatccagg | 5905 | ggcgagtgtgtttaggggt | 7296 | acccctaaacacactcgcc | 8686 |
| ctggatcatccgtgggggc | 4515 | gcccccacggatgatccag | 5906 | gcgagtgtgtttaggggtg | 7297 | cacccctaaacacactcgc | 8687 |
| tggatcatccgtgggggca | 4516 | tgcccccacggatgatcca | 5907 | cgagtgtgtttaggggtgg | 7298 | ccacccctaaacacactcg | 8688 |
| ggatcatccgtgggggcac | 4517 | gtgcccccacggatgatcc | 5908 | gagtgtgtttaggggtggc | 7299 | gccacccctaaacacactc | 8689 |
| gatcatccgtgggggcacc | 4518 | ggtgcccccacggatgatc | 5909 | agtgtgtttaggggtggca | 7300 | tgccacccctaaacacact | 8690 |
| atcatccgtgggggcaccg | 4519 | cggtgcccccacggatgat | 5910 | gtgtgtttaggggtggcag | 7301 | ctgccacccctaaacacac | 8691 |
| tcatccgtgggggcaccga | 4520 | tcggtgcccccacggatga | 5911 | tgtgtttaggggtggcagc | 7302 | gctgccacccctaaacaca | 8692 |
| catccgtgggggcaccgaa | 4521 | ttcggtgcccccacggatg | 5912 | gtgtttaggggtggcagct | 7303 | agctgccacccctaaacac | 8693 |
| atccgtgggggcaccgaag | 4522 | cttcggtgcccccacggat | 5913 | tgtttaggggtggcagctg | 7304 | cagctgccacccctaaaca | 8694 |
| tccgtgggggcaccgaagc | 4523 | gcttcggtgcccccacgga | 5914 | gtttaggggtggcagctgc | 7305 | gcagctgccacccctaaac | 8695 |
| ccgtgggggcaccgaagct | 4524 | agcttcggtgcccccacgg | 5915 | tttaggggtggcagctgcc | 7306 | ggcagctgccacccctaaa | 8696 |
| cgtgggggcaccgaagctg | 4525 | cagcttcggtgcccccacg | 5916 | ttaggggtggcagctgcct | 7307 | aggcagctgccacccctaa | 8697 |
| gtgggggcaccgaagctga | 4526 | tcagcttcggtgcccccac | 5917 | taggggtggcagctgcctt | 7308 | aaggcagctgccaccccta | 8698 |
| tgggggcaccgaagctgac | 4527 | gtcagcttcggtgccccca | 5918 | aggggtggcagctgccttc | 7309 | gaaggcagctgccacccct | 8699 |
| gggggcaccgaagctgact | 4528 | agtcagcttcggtgccccc | 5919 | ggggtggcagctgccttct | 7310 | agaaggcagctgccacccc | 8700 |
| ggggcaccgaagctgacta | 4529 | tagtcagcttcggtgcccc | 5920 | gggtggcagctgccttctt | 7311 | aagaaggcagctgccaccc | 8701 |
| gggcaccgaagctgactac | 4530 | gtagtcagcttcggtgccc | 5921 | ggtggcagctgccttcttc | 7312 | gaagaaggcagctgccacc | 8702 |
| ggcaccgaagctgactacc | 4531 | ggtagtcagcttcggtgcc | 5922 | gtggcagctgccttcttct | 7313 | agaagaaggcagctgccac | 8703 |
| gcaccgaagctgactacca | 4532 | tggtagtcagcttcggtgc | 5923 | tggcagctgccttcttctc | 7314 | gagaagaaggcagctgcca | 8704 |
| caccgaagctgactaccag | 4533 | ctggtagtcagcttcggtg | 5924 | ggcagctgccttcttctct | 7315 | agagaagaaggcagctgcc | 8705 |
| accgaagctgactaccagc | 4534 | gctggtagtcagcttcggt | 5925 | gcagctgccttcttctctc | 7316 | gagagaagaaggcagctgc | 8706 |
| ccgaagctgactaccagct | 4535 | agctggtagtcagcttcgg | 5926 | cagctgccttcttctctct | 7317 | agagagaagaaggcagctg | 8707 |
| cgaagctgactaccagctt | 4536 | aagctggtagtcagcttcg | 5927 | agctgccttcttctctctg | 7318 | cagagagaagaaggcagct | 8708 |
| gaagctgactaccagcttc | 4537 | gaagctggtagtcagcttc | 5928 | gctgccttcttctctctgt | 7319 | acagagagaagaaggcagc | 8709 |
| aagctgactaccagcttca | 4538 | tgaagctggtagtcagctt | 5929 | ctgccttcttctctctgtc | 7320 | gacagagagaagaaggcag | 8710 |
| agctgactaccagcttcac | 4539 | gtgaagctggtagtcagct | 5930 | tgccttcttctctctgtcc | 7321 | ggacagagagaagaaggca | 8711 |
| gctgactaccagcttcacg | 4540 | cgtgaagctggtagtcagc | 5931 | gccttcttctctctgtccc | 7322 | gggacagagagaagaaggc | 8712 |
| ctgactaccagcttcacgg | 4541 | ccgtgaagctggtagtcag | 5932 | ccttcttctctctgtcccc | 7323 | ggggacagagagaagaagg | 8713 |
| tgactaccagcttcacggc | 4542 | gccgtgaagctggtagtca | 5933 | cttcttctctctgtcccct | 7324 | aggggacagagagaagaag | 8714 |
| gactaccagcttcacggcg | 4543 | cgccgtgaagctggtagtc | 5934 | ttcttctctctgtcccctg | 7325 | caggggacagagagaagaa | 8715 |
| actaccagcttcacggcgt | 4544 | acgccgtgaagctggtagt | 5935 | tcttctctctgtcccctga | 7326 | tcaggggacagagagaaga | 8716 |
| ctaccagcttcacggcgtc | 4545 | gacgccgtgaagctggtag | 5936 | cttctctctgtcccctgac | 7327 | gtcaggggacagagagaag | 8717 |
| taccagcttcacggcgtcc | 4546 | ggacgccgtgaagctggta | 5937 | ttctctctgtcccctgact | 7328 | agtcaggggacagagagaa | 8718 |
| accagcttcacggcgtcca | 4547 | tggacgccgtgaagctggt | 5938 | tctctctgtcccctgactc | 7329 | gagtcaggggacagagaga | 8719 |
| ccagcttcacggcgtccaa | 4548 | ttggacgccgtgaagctgg | 5939 | ctctctgtcccctgactcc | 7330 | ggagtcaggggacagagag | 8720 |
| cagcttcacggcgtccaag | 4549 | cttggacgccgtgaagctg | 5940 | tctctgtcccctgactcct | 7331 | aggagtcaggggacagaga | 8721 |
| agcttcacggcgtccaagt | 4550 | acttggacgccgtgaagct | 5941 | ctctgtcccctgactcctg | 7332 | caggagtcaggggacagag | 8722 |
| gcttcacggcgtccaagtc | 4551 | gacttggacgccgtgaagc | 5942 | tctgtcccctgactcctga | 7333 | tcaggagtcaggggacaga | 8723 |
| cttcacggcgtccaagtca | 4552 | tgacttggacgccgtgaag | 5943 | ctgtcccctgactcctgac | 7334 | gtcaggagtcaggggacag | 8724 |
| ttcacggcgtccaagtcat | 4553 | atgacttggacgccgtgaa | 5944 | tgtcccctgactcctgact | 7335 | agtcaggagtcaggggaca | 8725 |
| tcacggcgtccaagtcatc | 4554 | gatgacttggacgccgtga | 5945 | gtcccctgactcctgactg | 7336 | cagtcaggagtcaggggac | 8726 |
| cacggcgtccaagtcatct | 4555 | agatgacttggacgccgtg | 5946 | tcccctgactcctgactgt | 7337 | acagtcaggagtcagggga | 8727 |
| acggcgtccaagtcatctg | 4556 | cagatgacttggacgccgt | 5947 | cccctgactcctgactgtg | 7338 | cacagtcaggagtcagggg | 8728 |
| cggcgtccaagtcatctgc | 4557 | gcagatgacttggacgccg | 5948 | ccctgactcctgactgtgt | 7339 | acacagtcaggagtcaggg | 8729 |
| ggcgtccaagtcatctgcc | 4558 | ggcagatgacttggacgcc | 5949 | cctgactcctgactgtgtt | 7340 | aacacagtcaggagtcagg | 8730 |
| gcgtccaagtcatctgcca | 4559 | tggcagatgacttggacgc | 5950 | ctgactcctgactgtgttt | 7341 | aaacacagtcaggagtcag | 8731 |
| cgtccaagtcatctgccac | 4560 | gtggcagatgacttggacg | 5951 | tgactcctgactgtgtttc | 7342 | gaaacacagtcaggagtca | 8732 |
| gtccaagtcatctgccaca | 4561 | tgtggcagatgacttggac | 5952 | gactcctgactgtgtttct | 7343 | agaaacacagtcaggagtc | 8733 |
| tccaagtcatctgccacac | 4562 | gtgtggcagatgacttgga | 5953 | actcctgactgtgtttctg | 7344 | cagaaacacagtcaggagt | 8734 |
| ccaagtcatctgccacaca | 4563 | tgtgtggcagatgacttgg | 5954 | ctcctgactgtgtttctga | 7345 | tcagaaacacagtcaggag | 8735 |
| caagtcatctgccacacag | 4564 | ctgtgtggcagatgacttg | 5955 | tcctgactgtgtttctgag | 7346 | ctcagaaacacagtcagga | 8736 |
| aagtcatctgccacacaga | 4565 | tctgtgtggcagatgactt | 5956 | cctgactgtgtttctgagc | 7347 | gctcagaaacacagtcagg | 8737 |
| agtcatctgccacacagag | 4566 | ctctgtgtggcagatgact | 5957 | ctgactgtgtttctgagct | 7348 | agctcagaaacacagtcag | 8738 |
| gtcatctgccacacagagg | 4567 | cctctgtgtggcagatgac | 5958 | tgactgtgtttctgagctg | 7349 | cagctcagaaacacagtca | 8739 |
| tcatctgccacacagaggc | 4568 | gcctctgtgtggcagatga | 5959 | gactgtgtttctgagctga | 7350 | tcagctcagaaacacagtc | 8740 |
| catctgccacacagaggca | 4569 | tgcctctgtgtggcagatg | 5960 | actgtgtttctgagctgag | 7351 | ctcagctcagaaacacagt | 8741 |
| atctgccacacagaggcag | 4570 | ctgcctctgtgtggcagat | 5961 | ctgtgtttctgagctgagc | 7352 | gctcagctcagaaacacag | 8742 |
| tctgccacacagaggcagt | 4571 | actgcctctgtgtggcaga | 5962 | tgtgtttctgagctgagct | 7353 | agctcagctcagaaacaca | 8743 |
| ctgccacacagaggcagtc | 4572 | gactgcctctgtgtggcag | 5963 | gtgtttctgagctgagctt | 7354 | aagctcagctcagaaacac | 8744 |
| tgccacacagaggcagtcg | 4573 | cgactgcctctgtgtggca | 5964 | tgtttctgagctgagctta | 7355 | taagctcagctcagaaaca | 8745 |
| gccacacagaggcagtcgc | 4574 | gcgactgcctctgtgtggc | 5965 | gtttctgagctgagcttaa | 7356 | ttaagctcagctcagaaac | 8746 |
| ccacacagaggcagtcgct | 4575 | agcgactgcctctgtgtgg | 5966 | tttctgagctgagcttaaa | 7357 | tttaagctcagctcagaaa | 8747 |
| cacacagaggcagtcgctg | 4576 | cagcgactgcctctgtgtg | 5967 | ttctgagctgagcttaaaa | 7358 | ttttaagctcagctcagaa | 8748 |
| acacagaggcagtcgctga | 4577 | tcagcgactgcctctgtgt | 5968 | tctgagctgagcttaaaag | 7359 | cttttaagctcagctcaga | 8749 |
| cacagaggcagtcgctgaa | 4578 | ttcagcgactgcctctgtg | 5969 | ctgagctgagcttaaaaga | 7360 | tcttttaagctcagctcag | 8750 |
| acagaggcagtcgctgaac | 4579 | gttcagcgactgcctctgt | 5970 | tgagctgagcttaaaagat | 7361 | atcttttaagctcagctca | 8751 |
| cagaggcagtcgctgaaca | 4580 | tgttcagcgactgcctctg | 5971 | gagctgagcttaaaagata | 7362 | tatcttttaagctcagctc | 8752 |
| agaggcagtcgctgaacag | 4581 | ctgttcagcgactgcctct | 5972 | agctgagcttaaaagatac | 7363 | gtatcttttaagctcagct | 8753 |
| gaggcagtcgctgaacagc | 4582 | gctgttcagcgactgcctc | 5973 | gctgagcttaaaagataca | 7364 | tgtatcttttaagctcagc | 8754 |
| aggcagtcgctgaacagct | 4583 | agctgttcagcgactgcct | 5974 | ctgagcttaaaagatacaa | 7365 | ttgtatcttttaagctcag | 8755 |
| ggcagtcgctgaacagctc | 4584 | gagctgttcagcgactgcc | 5975 | tgagcttaaaagatacaaa | 7366 | tttgtatcttttaagctca | 8756 |
| gcagtcgctgaacagctca | 4585 | tgagctgttcagcgactgc | 5976 | gagcttaaaagatacaaat | 7367 | atttgtatcttttaagctc | 8757 |
| cagtcgctgaacagctcag | 4586 | ctgagctgttcagcgactg | 5977 | agcttaaaagatacaaatg | 7368 | catttgtatcttttaagct | 8758 |
| agtcgctgaacagctcagc | 4587 | gctgagctgttcagcgact | 5978 | gcttaaaagatacaaatga | 7369 | tcatttgtatcttttaagc | 8759 |
| gtcgctgaacagctcagcc | 4588 | ggctgagctgttcagcgac | 5979 | cttaaaagatacaaatgac | 7370 | gtcatttgtatcttttaag | 8760 |
| tcgctgaacagctcagccg | 4589 | cggctgagctgttcagcga | 5980 | ttaaaagatacaaatgaca | 7371 | tgtcatttgtatcttttaa | 8761 |
| cgctgaacagctcagccga | 4590 | tcggctgagctgttcagcg | 5981 | taaaagatacaaatgacaa | 7372 | ttgtcatttgtatctttta | 8762 |
| gctgaacagctcagccgac | 4591 | gtcggctgagctgttcagc | 5982 | aaaagatacaaatgacaag | 7373 | cttgtcatttgtatctttt | 8763 |
| ctgaacagctcagccgact | 4592 | agtcggctgagctgttcag | 5983 | aaagatacaaatgacaagc | 7374 | gcttgtcatttgtatcttt | 8764 |
| tgaacagctcagccgactg | 4593 | cagtcggctgagctgttca | 5984 | aagatacaaatgacaagct | 7375 | agcttgtcatttgtatctt | 8765 |
| gaacagctcagccgactgg | 4594 | ccagtcggctgagctgttc | 5985 | agatacaaatgacaagctg | 7376 | cagcttgtcatttgtatct | 8766 |
| aacagctcagccgactggt | 4595 | accagtcggctgagctgtt | 5986 | gatacaaatgacaagctgc | 7377 | gcagcttgtcatttgtatc | 8767 |
| acagctcagccgactggtg | 4596 | caccagtcggctgagctgt | 5987 | atacaaatgacaagctgca | 7378 | tgcagcttgtcatttgtat | 8768 |
| cagctcagccgactggtga | 4597 | tcaccagtcggctgagctg | 5988 | tacaaatgacaagctgcag | 7379 | ctgcagcttgtcatttgta | 8769 |
| agctcagccgactggtgaa | 4598 | ttcaccagtcggctgagct | 5989 | acaaatgacaagctgcagc | 7380 | gctgcagcttgtcatttgt | 8770 |
| gctcagccgactggtgaac | 4599 | gttcaccagtcggctgagc | 5990 | caaatgacaagctgcagct | 7381 | agctgcagcttgtcatttg | 8771 |
| ctcagccgactggtgaacc | 4600 | ggttcaccagtcggctgag | 5991 | aaatgacaagctgcagctc | 7382 | gagctgcagcttgtcattt | 8772 |
| tcagccgactggtgaaccg | 4601 | cggttcaccagtcggctga | 5992 | aatgacaagctgcagctct | 7383 | agagctgcagcttgtcatt | 8773 |
| cagccgactggtgaaccga | 4602 | tcggttcaccagtcggctg | 5993 | atgacaagctgcagctctc | 7384 | gagagctgcagcttgtcat | 8774 |
| agccgactggtgaaccgaa | 4603 | ttcggttcaccagtcggct | 5994 | tgacaagctgcagctctct | 7385 | agagagctgcagcttgtca | 8775 |
| gccgactggtgaaccgaac | 4604 | gttcggttcaccagtcggc | 5995 | gacaagctgcagctctctc | 7386 | gagagagctgcagcttgtc | 8776 |
| ccgactggtgaaccgaact | 4605 | agttcggttcaccagtcgg | 5996 | acaagctgcagctctctct | 7387 | agagagagctgcagcttgt | 8777 |
| cgactggtgaaccgaactt | 4606 | aagttcggttcaccagtcg | 5997 | caagctgcagctctctctg | 7388 | cagagagagctgcagcttg | 8778 |
| gactggtgaaccgaacttg | 4607 | caagttcggttcaccagtc | 5998 | aagctgcagctctctctgc | 7389 | gcagagagagctgcagctt | 8779 |
| actggtgaaccgaacttgc | 4608 | gcaagttcggttcaccagt | 5999 | agctgcagctctctctgcc | 7390 | ggcagagagagctgcagct | 8780 |
| ctggtgaaccgaacttgcc | 4609 | ggcaagttcggttcaccag | 6000 | gctgcagctctctctgcca | 7391 | tggcagagagagctgcagc | 8781 |
| tggtgaaccgaacttgccc | 4610 | gggcaagttcggttcacca | 6001 | ctgcagctctctctgccat | 7392 | atggcagagagagctgcag | 8782 |
| ggtgaaccgaacttgccca | 4611 | tgggcaagttcggttcacc | 6002 | tgcagctctctctgccatt | 7393 | aatggcagagagagctgca | 8783 |
| gtgaaccgaacttgcccag | 4612 | ctgggcaagttcggttcac | 6003 | gcagctctctctgccattg | 7394 | caatggcagagagagctgc | 8784 |
| tgaaccgaacttgcccagg | 4613 | cctgggcaagttcggttca | 6004 | cagctctctctgccattgc | 7395 | gcaatggcagagagagctg | 8785 |
| gaaccgaacttgcccaggc | 4614 | gcctgggcaagttcggttc | 6005 | agctctctctgccattgct | 7396 | agcaatggcagagagagct | 8786 |
| aaccgaacttgcccaggct | 4615 | agcctgggcaagttcggtt | 6006 | gctctctctgccattgctt | 7397 | aagcaatggcagagagagc | 8787 |
| accgaacttgcccaggctt | 4616 | aagcctgggcaagttcggt | 6007 | ctctctctgccattgcttc | 7398 | gaagcaatggcagagagag | 8788 |
| ccgaacttgcccaggcttc | 4617 | gaagcctgggcaagttcgg | 6008 | tctctctgccattgcttct | 7399 | agaagcaatggcagagaga | 8789 |
| cgaacttgcccaggcttcc | 4618 | ggaagcctgggcaagttcg | 6009 | ctctctgccattgcttctc | 7400 | gagaagcaatggcagagag | 8790 |
| gaacttgcccaggcttcct | 4619 | aggaagcctgggcaagttc | 6010 | tctctgccattgcttctct | 7401 | agagaagcaatggcagaga | 8791 |
| aacttgcccaggcttcctg | 4620 | caggaagcctgggcaagtt | 6011 | ctctgccattgcttctctt | 7402 | aagagaagcaatggcagag | 8792 |
| acttgcccaggcttcctgg | 4621 | ccaggaagcctgggcaagt | 6012 | tctgccattgcttctcttt | 7403 | aaagagaagcaatggcaga | 8793 |
| cttgcccaggcttcctggc | 4622 | gccaggaagcctgggcaag | 6013 | ctgccattgcttctcttta | 7404 | taaagagaagcaatggcag | 8794 |
| ttgcccaggcttcctggct | 4623 | agccaggaagcctgggcaa | 6014 | tgccattgcttctctttat | 7405 | ataaagagaagcaatggca | 8795 |
| tgcccaggcttcctggctc | 4624 | gagccaggaagcctgggca | 6015 | gccattgcttctctttatc | 7406 | gataaagagaagcaatggc | 8796 |
| gcccaggcttcctggctcc | 4625 | ggagccaggaagcctgggc | 6016 | ccattgcttctctttatct | 7407 | agataaagagaagcaatgg | 8797 |
| cccaggcttcctggctcct | 4626 | aggagccaggaagcctggg | 6017 | cattgcttctctttatctc | 7408 | gagataaagagaagcaatg | 8798 |
| ccaggcttcctggctcctg | 4627 | caggagccaggaagcctgg | 6018 | attgcttctctttatctct | 7409 | agagataaagagaagcaat | 8799 |
| caggcttcctggctcctgg | 4628 | ccaggagccaggaagcctg | 6019 | ttgcttctctttatctctc | 7410 | gagagataaagagaagcaa | 8800 |
| aggcttcctggctcctggt | 4629 | accaggagccaggaagcct | 6020 | tgcttctctttatctctcc | 7411 | ggagagataaagagaagca | 8801 |
| ggcttcctggctcctggtg | 4630 | caccaggagccaggaagcc | 6021 | gcttctctttatctctcca | 7412 | tggagagataaagagaagc | 8802 |
| gcttcctggctcctggtgg | 4631 | ccaccaggagccaggaagc | 6022 | cttctctttatctctccaa | 7413 | ttggagagataaagagaag | 8803 |
| cttcctggctcctggtggt | 4632 | accaccaggagccaggaag | 6023 | ttctctttatctctccaaa | 7414 | tttggagagataaagagaa | 8804 |
| ttcctggctcctggtggtc | 4633 | gaccaccaggagccaggaa | 6024 | tctctttatctctccaaat | 7415 | atttggagagataaagaga | 8805 |
| tcctggctcctggtggtcc | 4634 | ggaccaccaggagccagga | 6025 | ctctttatctctccaaatc | 7416 | gatttggagagataaagag | 8806 |
| cctggctcctggtggtccc | 4635 | gggaccaccaggagccagg | 6026 | tctttatctctccaaatcc | 7417 | ggatttggagagataaaga | 8807 |
| ctggctcctggtggtccct | 4636 | agggaccaccaggagccag | 6027 | ctttatctctccaaatccc | 7418 | gggatttggagagataaag | 8808 |
| tggctcctggtggtccctg | 4637 | cagggaccaccaggagcca | 6028 | tttatctctccaaatccct | 7419 | agggatttggagagataaa | 8809 |
| ggctcctggtggtccctgg | 4638 | ccagggaccaccaggagcc | 6029 | ttatctctccaaatccctt | 7420 | aagggatttggagagataa | 8810 |
| gctcctggtggtccctggg | 4639 | cccagggaccaccaggagc | 6030 | tatctctccaaatcccttc | 7421 | gaagggatttggagagata | 8811 |
| ctcctggtggtccctgggt | 4640 | acccagggaccaccaggag | 6031 | atctctccaaatcccttcc | 7422 | ggaagggatttggagagat | 8812 |
| tcctggtggtccctgggta | 4641 | tacccagggaccaccagga | 6032 | tctctccaaatcccttcca | 7423 | tggaagggatttggagaga | 8813 |
| cctggtggtccctgggtac | 4642 | gtacccagggaccaccagg | 6033 | ctctccaaatcccttccac | 7424 | gtggaagggatttggagag | 8814 |
| ctggtggtccctgggtaca | 4643 | tgtacccagggaccaccag | 6034 | tctccaaatcccttccaca | 7425 | tgtggaagggatttggaga | 8815 |
| tggtggtccctgggtacag | 4644 | ctgtacccagggaccacca | 6035 | ctccaaatcccttccacac | 7426 | gtgtggaagggatttggag | 8816 |
| ggtggtccctgggtacagg | 4645 | cctgtacccagggaccacc | 6036 | tccaaatcccttccacact | 7427 | agtgtggaagggatttgga | 8817 |
| gtggtccctgggtacagga | 4646 | tcctgtacccagggaccac | 6037 | ccaaatcccttccacactc | 7428 | gagtgtggaagggatttgg | 8818 |
| tggtccctgggtacaggac | 4647 | gtcctgtacccagggacca | 6038 | caaatcccttccacactcg | 7429 | cgagtgtggaagggatttg | 8819 |
| ggtccctgggtacaggacg | 4648 | cgtcctgtacccagggacc | 6039 | aaatcccttccacactcga | 7430 | tcgagtgtggaagggattt | 8820 |
| gtccctgggtacaggacgt | 4649 | acgtcctgtacccagggac | 6040 | aatcccttccacactcgag | 7431 | ctcgagtgtggaagggatt | 8821 |
| tccctgggtacaggacgta | 4650 | tacgtcctgtacccaggga | 6041 | atcccttccacactcgagg | 7432 | cctcgagtgtggaagggat | 8822 |
| ccctgggtacaggacgtag | 4651 | ctacgtcctgtacccaggg | 6042 | tcccttccacactcgaggt | 7433 | acctcgagtgtggaaggga | 8823 |
| cctgggtacaggacgtagc | 4652 | gctacgtcctgtacccagg | 6043 | cccttccacactcgaggtt | 7434 | aacctcgagtgtggaaggg | 8824 |
| ctgggtacaggacgtagcc | 4653 | ggctacgtcctgtacccag | 6044 | ccttccacactcgaggttt | 7435 | aaacctcgagtgtggaagg | 8825 |
| tgggtacaggacgtagcct | 4654 | aggctacgtcctgtaccca | 6045 | cttccacactcgaggtttt | 7436 | aaaacctcgagtgtggaag | 8826 |
| gggtacaggacgtagccta | 4655 | taggctacgtcctgtaccc | 6046 | ttccacactcgaggttttc | 7437 | gaaaacctcgagtgtggaa | 8827 |
| ggtacaggacgtagcctat | 4656 | ataggctacgtcctgtacc | 6047 | tccacactcgaggttttcg | 7438 | cgaaaacctcgagtgtgga | 8828 |
| gtacaggacgtagcctatg | 4657 | cataggctacgtcctgtac | 6048 | ccacactcgaggttttcga | 7439 | tcgaaaacctcgagtgtgg | 8829 |
| tacaggacgtagcctatga | 4658 | tcataggctacgtcctgta | 6049 | cacactcgaggttttcgac | 7440 | gtcgaaaacctcgagtgtg | 8830 |
| acaggacgtagcctatgac | 4659 | gtcataggctacgtcctgt | 6050 | acactcgaggttttcgaca | 7441 | tgtcgaaaacctcgagtgt | 8831 |
| caggacgtagcctatgacc | 4660 | ggtcataggctacgtcctg | 6051 | cactcgaggttttcgacac | 7442 | gtgtcgaaaacctcgagtg | 8832 |
| aggacgtagcctatgacct | 4661 | aggtcataggctacgtcct | 6052 | actcgaggttttcgacact | 7443 | agtgtcgaaaacctcgagt | 8833 |
| ggacgtagcctatgacctg | 4662 | caggtcataggctacgtcc | 6053 | ctcgaggttttcgacactg | 7444 | cagtgtcgaaaacctcgag | 8834 |
| gacgtagcctatgacctgt | 4663 | acaggtcataggctacgtc | 6054 | tcgaggttttcgacactgg | 7445 | ccagtgtcgaaaacctcga | 8835 |
| acgtagcctatgacctgtg | 4664 | cacaggtcataggctacgt | 6055 | cgaggttttcgacactgga | 7446 | tccagtgtcgaaaacctcg | 8836 |
| cgtagcctatgacctgtgg | 4665 | ccacaggtcataggctacg | 6056 | gaggttttcgacactggaa | 7447 | ttccagtgtcgaaaacctc | 8837 |
| gtagcctatgacctgtggc | 4666 | gccacaggtcataggctac | 6057 | aggttttcgacactggaac | 7448 | gttccagtgtcgaaaacct | 8838 |
| tagcctatgacctgtggca | 4667 | tgccacaggtcataggcta | 6058 | ggttttcgacactggaacc | 7449 | ggttccagtgtcgaaaacc | 8839 |
| agcctatgacctgtggcag | 4668 | ctgccacaggtcataggct | 6059 | gttttcgacactggaaccc | 7450 | gggttccagtgtcgaaaac | 8840 |
| gcctatgacctgtggcagg | 4669 | cctgccacaggtcataggc | 6060 | ttttcgacactggaaccca | 7451 | tgggttccagtgtcgaaaa | 8841 |
| cctatgacctgtggcagga | 4670 | tcctgccacaggtcatagg | 6061 | tttcgacactggaacccag | 7452 | ctgggttccagtgtcgaaa | 8842 |
| ctatgacctgtggcaggag | 4671 | ctcctgccacaggtcatag | 6062 | ttcgacactggaacccagt | 7453 | actgggttccagtgtcgaa | 8843 |
| tatgacctgtggcaggagg | 4672 | cctcctgccacaggtcata | 6063 | tcgacactggaacccagtg | 7454 | cactgggttccagtgtcga | 8844 |
| atgacctgtggcaggagga | 4673 | tcctcctgccacaggtcat | 6064 | cgacactggaacccagtgc | 7455 | gcactgggttccagtgtcg | 8845 |
| tgacctgtggcaggaggag | 4674 | ctcctcctgccacaggtca | 6065 | gacactggaacccagtgca | 7456 | tgcactgggttccagtgtc | 8846 |
| gacctgtggcaggaggaga | 4675 | tctcctcctgccacaggtc | 6066 | acactggaacccagtgcag | 7457 | ctgcactgggttccagtgt | 8847 |
| acctgtggcaggaggagag | 4676 | ctctcctcctgccacaggt | 6067 | cactggaacccagtgcagc | 7458 | gctgcactgggttccagtg | 8848 |
| cctgtggcaggaggagagt | 4677 | actctcctcctgccacagg | 6068 | actggaacccagtgcagcg | 7459 | cgctgcactgggttccagt | 8849 |
| ctgtggcaggaggagagta | 4678 | tactctcctcctgccacag | 6069 | ctggaacccagtgcagcgt | 7460 | acgctgcactgggttccag | 8850 |
| tgtggcaggaggagagtaa | 4679 | ttactctcctcctgccaca | 6070 | tggaacccagtgcagcgtt | 7461 | aacgctgcactgggttcca | 8851 |
| gtggcaggaggagagtaac | 4680 | gttactctcctcctgccac | 6071 | ggaacccagtgcagcgttg | 7462 | caacgctgcactgggttcc | 8852 |
| tggcaggaggagagtaacc | 4681 | ggttactctcctcctgcca | 6072 | gaacccagtgcagcgttgg | 7463 | ccaacgctgcactgggttc | 8853 |
| ggcaggaggagagtaacca | 4682 | tggttactctcctcctgcc | 6073 | aacccagtgcagcgttggc | 7464 | gccaacgctgcactgggtt | 8854 |
| gcaggaggagagtaaccac | 4683 | gtggttactctcctcctgc | 6074 | acccagtgcagcgttggct | 7465 | agccaacgctgcactgggt | 8855 |
| caggaggagagtaaccacg | 4684 | cgtggttactctcctcctg | 6075 | cccagtgcagcgttggctt | 7466 | aagccaacgctgcactggg | 8856 |
| aggaggagagtaaccacga | 4685 | tcgtggttactctcctcct | 6076 | ccagtgcagcgttggcttg | 7467 | caagccaacgctgcactgg | 8857 |
| ggaggagagtaaccacgag | 4686 | ctcgtggttactctcctcc | 6077 | cagtgcagcgttggcttgg | 7468 | ccaagccaacgctgcactg | 8858 |
| gaggagagtaaccacgagt | 4687 | actcgtggttactctcctc | 6078 | agtgcagcgttggcttggg | 7469 | cccaagccaacgctgcact | 8859 |
| aggagagtaaccacgagtg | 4688 | cactcgtggttactctcct | 6079 | gtgcagcgttggcttggga | 7470 | tcccaagccaacgctgcac | 8860 |
| ggagagtaaccacgagtgc | 4689 | gcactcgtggttactctcc | 6080 | tgcagcgttggcttgggac | 7471 | gtcccaagccaacgctgca | 8861 |
| gagagtaaccacgagtgca | 4690 | tgcactcgtggttactctc | 6081 | gcagcgttggcttgggacc | 7472 | ggtcccaagccaacgctgc | 8862 |
| agagtaaccacgagtgcac | 4691 | gtgcactcgtggttactct | 6082 | cagcgttggcttgggaccg | 7473 | cggtcccaagccaacgctg | 8863 |
| gagtaaccacgagtgcacc | 4692 | ggtgcactcgtggttactc | 6083 | agcgttggcttgggaccgc | 7474 | gcggtcccaagccaacgct | 8864 |
| agtaaccacgagtgcacca | 4693 | tggtgcactcgtggttact | 6084 | gcgttggcttgggaccgcc | 7475 | ggcggtcccaagccaacgc | 8865 |
| gtaaccacgagtgcaccaa | 4694 | ttggtgcactcgtggttac | 6085 | cgttggcttgggaccgcca | 7476 | tggcggtcccaagccaacg | 8866 |
| taaccacgagtgcaccaag | 4695 | cttggtgcactcgtggtta | 6086 | gttggcttgggaccgccat | 7477 | atggcggtcccaagccaac | 8867 |
| aaccacgagtgcaccaagg | 4696 | ccttggtgcactcgtggtt | 6087 | ttggcttgggaccgccatg | 7478 | catggcggtcccaagccaa | 8868 |
| accacgagtgcaccaaggc | 4697 | gccttggtgcactcgtggt | 6088 | tggcttgggaccgccatga | 7479 | tcatggcggtcccaagcca | 8869 |
| ccacgagtgcaccaaggct | 4698 | agccttggtgcactcgtgg | 6089 | ggcttgggaccgccatgaa | 7480 | ttcatggcggtcccaagcc | 8870 |
| cacgagtgcaccaaggctg | 4699 | cagccttggtgcactcgtg | 6090 | gcttgggaccgccatgaag | 7481 | cttcatggcggtcccaagc | 8871 |
| acgagtgcaccaaggctgt | 4700 | acagccttggtgcactcgt | 6091 | cttgggaccgccatgaaga | 7482 | tcttcatggcggtcccaag | 8872 |
| cgagtgcaccaaggctgtg | 4701 | cacagccttggtgcactcg | 6092 | ttgggaccgccatgaagac | 7483 | gtcttcatggcggtcccaa | 8873 |
| gagtgcaccaaggctgtga | 4702 | tcacagccttggtgcactc | 6093 | tgggaccgccatgaagacc | 7484 | ggtcttcatggcggtccca | 8874 |
| agtgcaccaaggctgtgaa | 4703 | ttcacagccttggtgcact | 6094 | gggaccgccatgaagaccc | 7485 | gggtcttcatggcggtccc | 8875 |
| gtgcaccaaggctgtgaac | 4704 | gttcacagccttggtgcac | 6095 | ggaccgccatgaagacccc | 7486 | ggggtcttcatggcggtcc | 8876 |
| tgcaccaaggctgtgaact | 4705 | agttcacagccttggtgca | 6096 | gaccgccatgaagacccca | 7487 | tggggtcttcatggcggtc | 8877 |
| gcaccaaggctgtgaactt | 4706 | aagttcacagccttggtgc | 6097 | accgccatgaagaccccat | 7488 | atggggtcttcatggcggt | 8878 |
| caccaaggctgtgaacttt | 4707 | aaagttcacagccttggtg | 6098 | ccgccatgaagaccccatg | 7489 | catggggtcttcatggcgg | 8879 |
| accaaggctgtgaactttg | 4708 | caaagttcacagccttggt | 6099 | cgccatgaagaccccatgt | 7490 | acatggggtcttcatggcg | 8880 |
| ccaaggctgtgaactttgc | 4709 | gcaaagttcacagccttgg | 6100 | gccatgaagaccccatgtt | 7491 | aacatggggtcttcatggc | 8881 |
| caaggctgtgaactttgcc | 4710 | ggcaaagttcacagccttg | 6101 | ccatgaagaccccatgttt | 7492 | aaacatggggtcttcatgg | 8882 |
| aaggctgtgaactttgcca | 4711 | tggcaaagttcacagcctt | 6102 | catgaagaccccatgtttg | 7493 | caaacatggggtcttcatg | 8883 |
| aggctgtgaactttgccat | 4712 | atggcaaagttcacagcct | 6103 | atgaagaccccatgtttgc | 7494 | gcaaacatggggtcttcat | 8884 |
| ggctgtgaactttgccatg | 4713 | catggcaaagttcacagcc | 6104 | tgaagaccccatgtttgcg | 7495 | cgcaaacatggggtcttca | 8885 |
| gctgtgaactttgccatgc | 4714 | gcatggcaaagttcacagc | 6105 | gaagaccccatgtttgcga | 7496 | tcgcaaacatggggtcttc | 8886 |
| ctgtgaactttgccatgca | 4715 | tgcatggcaaagttcacag | 6106 | aagaccccatgtttgcgac | 7497 | gtcgcaaacatggggtctt | 8887 |
| tgtgaactttgccatgcac | 4716 | gtgcatggcaaagttcaca | 6107 | agaccccatgtttgcgaca | 7498 | tgtcgcaaacatggggtct | 8888 |
| gtgaactttgccatgcacg | 4717 | cgtgcatggcaaagttcac | 6108 | gaccccatgtttgcgacag | 7499 | ctgtcgcaaacatggggtc | 8889 |
| tgaactttgccatgcacga | 4718 | tcgtgcatggcaaagttca | 6109 | accccatgtttgcgacagg | 7500 | cctgtcgcaaacatggggt | 8890 |
| gaactttgccatgcacgag | 4719 | ctcgtgcatggcaaagttc | 6110 | ccccatgtttgcgacagga | 7501 | tcctgtcgcaaacatgggg | 8891 |
| aactttgccatgcacgagc | 4720 | gctcgtgcatggcaaagtt | 6111 | cccatgtttgcgacaggag | 7502 | ctcctgtcgcaaacatggg | 8892 |
| actttgccatgcacgagct | 4721 | agctcgtgcatggcaaagt | 6112 | ccatgtttgcgacaggaga | 7503 | tctcctgtcgcaaacatgg | 8893 |
| ctttgccatgcacgagctg | 4722 | cagctcgtgcatggcaaag | 6113 | catgtttgcgacaggagag | 7504 | ctctcctgtcgcaaacatg | 8894 |
| tttgccatgcacgagctgc | 4723 | gcagctcgtgcatggcaaa | 6114 | atgtttgcgacaggagagc | 7505 | gctctcctgtcgcaaacat | 8895 |
| ttgccatgcacgagctgca | 4724 | tgcagctcgtgcatggcaa | 6115 | tgtttgcgacaggagagcc | 7506 | ggctctcctgtcgcaaaca | 8896 |
| tgccatgcacgagctgcag | 4725 | ctgcagctcgtgcatggca | 6116 | gtttgcgacaggagagcct | 7507 | aggctctcctgtcgcaaac | 8897 |
| gccatgcacgagctgcagc | 4726 | gctgcagctcgtgcatggc | 6117 | tttgcgacaggagagcctg | 7508 | caggctctcctgtcgcaaa | 8898 |
| ccatgcacgagctgcagct | 4727 | agctgcagctcgtgcatgg | 6118 | ttgcgacaggagagcctgg | 7509 | ccaggctctcctgtcgcaa | 8899 |
| catgcacgagctgcagctc | 4728 | gagctgcagctcgtgcatg | 6119 | tgcgacaggagagcctggg | 7510 | cccaggctctcctgtcgca | 8900 |
| atgcacgagctgcagctca | 4729 | tgagctgcagctcgtgcat | 6120 | gcgacaggagagcctgggt | 7511 | acccaggctctcctgtcgc | 8901 |
| tgcacgagctgcagctcat | 4730 | atgagctgcagctcgtgca | 6121 | cgacaggagagcctgggtt | 7512 | aacccaggctctcctgtcg | 8902 |
| gcacgagctgcagctcatc | 4731 | gatgagctgcagctcgtgc | 6122 | gacaggagagcctgggttg | 7513 | caacccaggctctcctgtc | 8903 |
| cacgagctgcagctcatcc | 4732 | ggatgagctgcagctcgtg | 6123 | acaggagagcctgggttgg | 7514 | ccaacccaggctctcctgt | 8904 |
| acgagctgcagctcatccg | 4733 | cggatgagctgcagctcgt | 6124 | caggagagcctgggttggt | 7515 | accaacccaggctctcctg | 8905 |
| cgagctgcagctcatccgt | 4734 | acggatgagctgcagctcg | 6125 | aggagagcctgggttggtg | 7516 | caccaacccaggctctcct | 8906 |
| gagctgcagctcatccgtg | 4735 | cacggatgagctgcagctc | 6126 | ggagagcctgggttggtgt | 7517 | acaccaacccaggctctcc | 8907 |
| agctgcagctcatccgtgt | 4736 | acacggatgagctgcagct | 6127 | gagagcctgggttggtgtt | 7518 | aacaccaacccaggctctc | 8908 |
| gctgcagctcatccgtgtg | 4737 | cacacggatgagctgcagc | 6128 | agagcctgggttggtgttg | 7519 | caacaccaacccaggctct | 8909 |
| ctgcagctcatccgtglgg | 4738 | ccacacggatgagctgcag | 6129 | gagcctgggttggtgttga | 7520 | tcaacaccaacccaggctc | 8910 |
| tgcagctcatccgtgtgga | 4739 | tccacacggatgagctgca | 6130 | agcctgggttggtgttgag | 7521 | ctcaacaccaacccaggct | 8911 |
| gcagctcatccgtgtggag | 4740 | ctccacacggatgagctgc | 6131 | gcctgggttggtgttgagt | 7522 | actcaacaccaacccaggc | 8912 |
| cagctcatccgtgtggaga | 4741 | tctccacacggatgagctg | 6132 | cctgggttggtgttgagta | 7523 | tactcaacaccaacccagg | 8913 |
| agctcatccgtgtggagaa | 4742 | ttctccacacggatgagct | 6133 | ctgggttggtgttgagtac | 7524 | gtactcaacaccaacccag | 8914 |
| gctcatccgtgtggagaag | 4743 | cttctccacacggatgagc | 6134 | tgggttggtgttgagtaca | 7525 | tgtactcaacaccaaccca | 8915 |
| ctcatccgtgtggagaagc | 4744 | gcttctccacacggatgag | 6135 | gggttggtgttgagtacat | 7526 | atgtactcaacaccaaccc | 8916 |
| tcatccgtgtggagaagca | 4745 | tgcttctccacacggatga | 6136 | ggttggtgttgagtacata | 7527 | tatgtactcaacaccaacc | 8917 |
| catccgtgtggagaagcag | 4746 | ctgcttctccacacggatg | 6137 | gttggtgttgagtacataa | 7528 | ttatgtactcaacaccaac | 8918 |
| atccgtgtggagaagcagt | 4747 | actgcttctccacacggat | 6138 | ttggtgttgagtacataag | 7529 | cttatgtactcaacaccaa | 8919 |
| tccgtgtggagaagcagta | 4748 | tactgcttctccacacgga | 6139 | tggtgttgagtacataaga | 7530 | tcttatgtactcaacacca | 8920 |
| ccgtgtggagaagcagtat | 4749 | atactgcttctccacacgg | 6140 | ggtgttgagtacataagag | 7531 | ctcttatgtactcaacacc | 8921 |
| cgtgtggagaagcagtatc | 4750 | gatactgcttctccacacg | 6141 | gtgttgagtacataagaga | 7532 | tctcttatgtactcaacac | 8922 |
| gtgtggagaagcagtatcc | 4751 | ggatactgcttctccacac | 6142 | tgttgagtacataagagac | 7533 | gtctcttatgtactcaaca | 8923 |
| tgtggagaagcagtatccc | 4752 | gggatactgcttctccaca | 6143 | gttgagtacataagagacg | 7534 | cgtctcttatgtactcaac | 8924 |
| gtggagaagcagtatcccc | 4753 | ggggatactgcttctccac | 6144 | ttgagtacataagagacga | 7535 | tcgtctcttatgtactcaa | 8925 |
| tggagaagcagtatcccca | 4754 | tggggatactgcttctcca | 6145 | tgagtacataagagacgag | 7536 | ctcgtctcttatgtactca | 8926 |
| ggagaagcagtatccccac | 4755 | gtggggatactgcttctcc | 6146 | gagtacataagagacgagg | 7537 | cctcgtctcttatgtactc | 8927 |
| gagaagcagtatccccacc | 4756 | ggtggggatactgcttctc | 6147 | agtacataagagacgaggc | 7538 | gcctcgtctcttatgtact | 8928 |
| agaagcagtatccccacca | 4757 | tggtggggatactgcttct | 6148 | gtacataagagacgaggca | 7539 | tgcctcgtctcttatgtac | 8929 |
| gaagcagtatccccaccac | 4758 | gtggtggggatactgcttc | 6149 | tacataagagacgaggcaa | 7540 | ttgcctcgtctcttatgta | 8930 |
| aagcagtatccccaccaca | 4759 | tgtggtggggatactgctt | 6150 | acataagagacgaggcaag | 7541 | cttgcctcgtctcttatgt | 8931 |
| agcagtatccccaccacag | 4760 | ctgtggtggggatactgct | 6151 | cataagagacgaggcaagg | 7542 | ccttgcctcgtctcttatg | 8932 |
| gcagtatccccaccacagc | 4761 | gctgtggtggggatactgc | 6152 | ataagagacgaggcaaggt | 7543 | accttgcctcgtctcttat | 8933 |
| cagtatccccaccacagcc | 4762 | ggctgtggtggggatactg | 6153 | taagagacgaggcaaggtt | 7544 | aaccttgcctcgtctctta | 8934 |
| agtatccccaccacagcct | 4763 | aggctgtggtggggatact | 6154 | aagagacgaggcaaggttc | 7545 | gaaccttgcctcgtctctt | 8935 |
| gtatccccaccacagcctg | 4764 | caggctgtggtggggatac | 6155 | agagacgaggcaaggttca | 7546 | tgaaccttgcctcgtctct | 8936 |
| tatccccaccacagcctgg | 4765 | ccaggctgtggtggggata | 6156 | gagacgaggcaaggttcag | 7547 | ctgaaccttgcctcgtctc | 8937 |
| atccccaccacagcctgga | 4766 | tccaggctgtggtggggat | 6157 | agacgaggcaaggttcagc | 7548 | gctgaaccttgcctcgtct | 8938 |
| tccccaccacagcctggac | 4767 | gtccaggctgtggtgggga | 6158 | gacgaggcaaggttcagct | 7549 | agctgaaccttgcctcgtc | 8939 |
| ccccaccacagcctggacc | 4768 | ggtccaggctgtggtgggg | 6159 | acgaggcaaggttcagcta | 7550 | tagctgaaccttgcctcgt | 8940 |
| cccaccacagcctggacca | 4769 | tggtccaggctgtggtggg | 6160 | cgaggcaaggttcagctaa | 7551 | ttagctgaaccttgcctcg | 8941 |
| ccaccacagcctggaccac | 4770 | gtggtccaggctgtggtgg | 6161 | gaggcaaggttcagctaag | 7552 | cttagctgaaccttgcctc | 8942 |
| caccacagcctggaccacc | 4771 | ggtggtccaggctgtggtg | 6162 | aggcaaggttcagctaagt | 7553 | acttagctgaaccttgcct | 8943 |
| accacagcctggaccacct | 4772 | aggtggtccaggctgtggt | 6163 | ggcaaggttcagctaagtc | 7554 | gacttagctgaaccttgcc | 8944 |
| ccacagcctggaccacctg | 4773 | caggtggtccaggctgtgg | 6164 | gcaaggttcagctaagtct | 7555 | agacttagctgaaccttgc | 8945 |
| cacagcctggaccacctgg | 4774 | ccaggtggtccaggctgtg | 6165 | caaggttcagctaagtctt | 7556 | aagacttagctgaaccttg | 8946 |
| acagcctggaccacctggt | 4775 | accaggtggtccaggctgt | 6166 | aaggttcagctaagtcttt | 7557 | aaagacttagctgaacctt | 8947 |
| cagcctggaccacctggtg | 4776 | caccaggtggtccaggctg | 6167 | aggttcagctaagtctttg | 7558 | caaagacttagctgaacct | 8948 |
| agcctggaccacctggtgg | 4777 | ccaccaggtggtccaggct | 6168 | ggttcagctaagtctttgt | 7559 | acaaagacttagctgaacc | 8949 |
| gcctggaccacctggtgga | 4778 | tccaccaggtggtccaggc | 6169 | gttcagctaagtctttgtc | 7560 | gacaaagacttagctgaac | 8950 |
| cctggaccacctggtggag | 4779 | ctccaccaggtggtccagg | 6170 | ttcagctaagtctttgtcc | 7561 | ggacaaagacttagctgaa | 8951 |
| ctggaccacctggtggagg | 4780 | cctccaccaggtggtccag | 6171 | tcagctaagtctttgtccc | 7562 | gggacaaagacttagctga | 8952 |
| tggaccacctggtggagga | 4781 | tcctccaccaggtggtcca | 6172 | cagctaagtctttgtccca | 7563 | tgggacaaagacttagctg | 8953 |
| ggaccacctggtggaggag | 4782 | ctcctccaccaggtggtcc | 6173 | agctaagtctttgtcccag | 7564 | ctgggacaaagacttagct | 8954 |
| gaccacctggtggaggagc | 4783 | gctcctccaccaggtggtc | 6174 | gctaagtctttgtcccagc | 7565 | gctgggacaaagacttagc | 8955 |
| accacctggtggaggagct | 4784 | agctcctccaccaggtggt | 6175 | ctaagtctttgtcccagcc | 7566 | ggctgggacaaagacttag | 8956 |
| ccacctggtggaggagctc | 4785 | gagctcctccaccaggtgg | 6176 | taagtctttgtcccagcct | 7567 | aggctgggacaaagactta | 8957 |
| cacctggtggaggagctct | 4786 | agagctcctccaccaggtg | 6177 | aagtctttgtcccagcctt | 7568 | aaggctgggacaaagactt | 8958 |
| acctggtggaggagctctt | 4787 | aagagctcctccaccaggt | 6178 | agtctttgtcccagcctta | 7569 | taaggctgggacaaagact | 8959 |
| cctggtggaggagctcttc | 4788 | gaagagctcctccaccagg | 6179 | gtctttgtcccagccttaa | 7570 | ttaaggctgggacaaagac | 8960 |
| ctggtggaggagctcttcc | 4789 | ggaagagctcctccaccag | 6180 | tctttgtcccagccttaat | 7571 | attaaggctgggacaaaga | 8961 |
| tggtggaggagctcttcct | 4790 | aggaagagctcctccacca | 6181 | ctttgtcccagccttaatg | 7572 | cattaaggctgggacaaag | 8962 |
| ggtggaggagctcttcctg | 4791 | caggaagagctcctccacc | 6182 | tttgtcccagccttaatgc | 7573 | gcattaaggctgggacaaa | 8963 |
| gtggaggagctcttcctgg | 4792 | ccaggaagagctcctccac | 6183 | ttgtcccagccttaatgct | 7574 | agcattaaggctgggacaa | 8964 |
| tggaggagctcttcctggg | 4793 | cccaggaagagctcctcca | 6184 | tgtcccagccttaatgcta | 7575 | tagcattaaggctgggaca | 8965 |
| ggaggagctcttcctgggc | 4794 | gcccaggaagagctcctcc | 6185 | gtcccagccttaatgctaa | 7576 | ttagcattaaggctgggac | 8966 |
| gaggagctcttcctgggcg | 4795 | cgcccaggaagagctcctc | 6186 | tcccagccttaatgctaac | 7577 | gttagcattaaggctggga | 8967 |
| aggagctcttcctgggcga | 4796 | tcgcccaggaagagctcct | 6187 | cccagccttaatgctaacc | 7578 | ggttagcattaaggctggg | 8968 |
| ggagctcttcctgggcgac | 4797 | gtcgcccaggaagagctcc | 6188 | ccagccttaatgctaacca | 7579 | tggttagcattaaggctgg | 8969 |
| gagctcttcctgggcgaca | 4798 | tgtcgcccaggaagagctc | 6189 | cagccttaatgctaaccaa | 7580 | ttggttagcattaaggctg | 8970 |
| agctcttcctgggcgacat | 4799 | atgtcgcccaggaagagct | 6190 | agccttaatgctaaccaac | 7581 | gttggttagcattaaggct | 8971 |
| gctcftcctgggcgacatc | 4800 | gatgtcgcccaggaagagc | 6191 | gccttaatgctaaccaaca | 7582 | tgttggttagcattaaggc | 8972 |
| ctcttcctgggcgacatcc | 4801 | ggatgtcgcccaggaagag | 6192 | ccttaatgctaaccaacac | 7583 | gtgttggttagcattaagg | 8973 |
| tcttcctgggcgacatcca | 4802 | tggatgtcgcccaggaaga | 6193 | cttaatgctaaccaacact | 7584 | agtgttggttagcattaag | 8974 |
| cttcctgggcgacatccac | 4803 | gtggatgtcgcccaggaag | 6194 | ttaatgctaaccaacactt | 7585 | aagtgttggttagcattaa | 8975 |
| ttcctgggcgacatccaca | 4804 | tgtggatgtcgcccaggaa | 6195 | taatgctaaccaacacttt | 7586 | aaagtgttggttagcatta | 8976 |
| tcctgggcgacatccacac | 4805 | gtgtggatgtcgcccagga | 6196 | aatgctaaccaacactttc | 7587 | gaaagtgttggttagcatt | 8977 |
| cctgggcgacatccacacg | 4806 | cgtgtggatgtcgcccagg | 6197 | atgctaaccaacactttca | 7588 | tgaaagtgttggttagcat | 8978 |
| ctgggcgacatccacacgg | 4807 | ccgtgtggatgtcgcccag | 6198 | tgctaaccaacactttcag | 7589 | ctgaaagtgttggttagca | 8979 |
| tgggcgacatccacacgga | 4808 | tccgtgtggatgtcgccca | 6199 | gctaaccaacactttcaga | 7590 | tctgaaagtgttggttagc | 8980 |
| gggcgacatccacacggac | 4809 | gtccgtgtggatgtcgccc | 6200 | ctaaccaacactttcagaa | 7591 | ttctgaaagtgttggttag | 8981 |
| ggcgacatccacacggacg | 4810 | cgtccgtgtggatgtcgcc | 6201 | taaccaacactttcagaaa | 7592 | tttctgaaagtgttggtta | 8982 |
| gcgacatccacacggacgc | 4811 | gcgtccgtgtggatgtcgc | 6202 | aaccaacactttcagaaat | 7593 | atttctgaaagtgttggtt | 8983 |
| cgacatccacacggacgct | 4812 | agcgtccgtgtggatgtcg | 6203 | accaacactttcagaaatg | 7594 | catttctgaaagtgttggt | 8984 |
| gacatccacacggacgcta | 4813 | tagcgtccgtgtggatgtc | 6204 | ccaacactttcagaaatgt | 7595 | acatttctgaaagtgttgg | 8985 |
| acatccacacggacgctac | 4814 | gtagcgtccgtgtggatgt | 6205 | caacactttcagaaatgtt | 7596 | aacatttctgaaagtgttg | 8986 |
| catccacacggacgctacc | 4815 | ggtagcgtccgtgtggatg | 6206 | aacactttcagaaatgttg | 7597 | caacatttctgaaagtgtt | 8987 |
| atccacacggacgctaccc | 4816 | gggtagcgtccgtgtggat | 6207 | acactttcagaaatgttga | 7598 | tcaacatttctgaaagtgt | 8988 |
| tccacacggacgctaccca | 4817 | tgggtagcgtccgtgtgga | 6208 | cactttcagaaatgttgag | 7599 | ctcaacatttctgaaagtg | 8989 |
| ccacacggacgctacccag | 4818 | ctgggtagcgtccgtgtgg | 6209 | actttcagaaatgttgagt | 7600 | actcaacatttctgaaagt | 8990 |
| cacacggacgctacccaga | 4819 | tctgggtagcgtccgtgtg | 6210 | ctttcagaaatgttgagta | 7601 | tactcaacatttctgaaag | 8991 |
| acacggacgctacccagag | 4820 | ctctgggtagcgtccgtgt | 6211 | tttcagaaatgttgagtag | 7602 | ctactcaacatttctgaaa | 8992 |
| cacggacgctacccagagg | 4821 | cctctgggtagcgtccgtg | 6212 | ttcagaaatgttgagtaga | 7603 | tctactcaacatttctgaa | 8993 |
| acggacgctacccagaggg | 4822 | ccctctgggtagcgtccgt | 6213 | tcagaaatgttgagtagag | 7604 | ctctactcaacatttctga | 8994 |
| cggacgctacccagagggt | 4823 | accctctgggtagcgtccg | 6214 | cagaaatgttgagtagaga | 7605 | tctctactcaacatttctg | 8995 |
| ggacgctacccagagggtg | 4824 | caccctctgggtagcgtcc | 6215 | agaaatgttgagtagagag | 7606 | ctctctactcaacatttct | 8996 |
| gacgctacccagagggtgt | 4825 | acaccctctgggtagcgtc | 6216 | gaaatgttgagtagagagg | 7607 | cctctctactcaacatttc | 8997 |
| acgctacccagagggtgtt | 4826 | aacaccctctgggtagcgt | 6217 | aaatgttgagtagagaggt | 7608 | acctctctactcaacattt | 8998 |
| cgctacccagagggtgttc | 4827 | gaacaccctctgggtagcg | 6218 | aatgttgagtagagaggtg | 7609 | cacctctctactcaacatt | 8999 |
| gctacccagagggtgttct | 4828 | agaacaccctctgggtagc | 6219 | atgttgagtagagaggtgt | 7610 | acacctctctactcaacat | 9000 |
| ctacccagagggtgttcta | 4829 | tagaacaccctctgggtag | 6220 | tgttgagtagagaggtgtc | 7611 | gacacctctctactcaaca | 9001 |
| tacccagagggtgttctac | 4830 | gtagaacaccctctgggta | 6221 | gttgagtagagaggtgtcc | 7612 | ggacacctctctactcaac | 9002 |
| acccagagggtgttctacc | 4831 | ggtagaacaccctctgggt | 6222 | ttgagtagagaggtgtccc | 7613 | gggacacctctctactcaa | 9003 |
| cccagagggtgttctaccg | 4832 | cggtagaacaccctctggg | 6223 | tgagtagagaggtgtccct | 7614 | agggacacctctctactca | 9004 |
| ccagagggtgttctaccgg | 4833 | ccggtagaacaccctctgg | 6224 | gagtagagaggtgtcccta | 7615 | tagggacacctctctactc | 9005 |
| cagagggtgttctaccggc | 4834 | gccggtagaacaccctctg | 6225 | agtagagaggtgtccctaa | 7616 | ttagggacacctctctact | 9006 |
| agagggtgttctaccggcc | 4835 | ggccggtagaacaccctct | 6226 | gtagagaggtgtccctaaa | 7617 | tttagggacacctctctac | 9007 |
| gagggtgttctaccggccg | 4836 | cggccggtagaacaccctc | 6227 | tagagaggtgtccctaaag | 7618 | ctttagggacacctctcta | 9008 |
| agggtgttctaccggccgt | 4837 | acggccggtagaacaccct | 6228 | agagaggtgtccctaaagc | 7619 | gctttagggacacctctct | 9009 |
| gggtgttctaccggccgtc | 4838 | gacggccggtagaacaccc | 6229 | gagaggtgtccctaaagct | 7620 | agctttagggacacctctc | 9010 |
| ggtgttctaccggccgtcc | 4839 | ggacggccggtagaacacc | 6230 | agaggtgtccctaaagctt | 7621 | aagctttagggacacctct | 9011 |
| gtgttctaccggccgtcca | 4840 | tggacggccggtagaacac | 6231 | gaggtgtccctaaagcttc | 7622 | gaagctttagggacacctc | 9012 |
| tgttctaccggccgtccag | 4841 | ctggacggccggtagaaca | 6232 | aggtgtccctaaagcttca | 7623 | tgaagctttagggacacct | 9013 |
| gttctaccggccgtccagt | 4842 | actggacggccggtagaac | 6233 | ggtgtccctaaagcttcaa | 7624 | ttgaagctttagggacacc | 9014 |
| ttctaccggccgtccagtt | 4843 | aactggacggccggtagaa | 6234 | gtgtccctaaagcttcaat | 7625 | attgaagctttagggacac | 9015 |
| tctaccggccgtccagtta | 4844 | taactggacggccggtaga | 6235 | tgtccctaaagcttcaatg | 7626 | cattgaagctttagggaca | 9016 |
| ctaccggccgtccagttac | 4845 | gtaactggacggccggtag | 6236 | gtccctaaagcttcaatgg | 7627 | ccattgaagctttagggac | 9017 |
| taccggccgtccagttacc | 4846 | ggtaactggacggccggta | 6237 | tccctaaagcttcaatgga | 7628 | tccattgaagctttaggga | 9018 |
| accggccgtccagttacca | 4847 | tggtaactggacggccggt | 6238 | ccctaaagcttcaatggaa | 7629 | ttccattgaagctttaggg | 9019 |
| ccggccgtccagttaccag | 4848 | ctggtaactggacggccgg | 6239 | cctaaagcttcaatggaac | 7630 | gttccattgaagctttagg | 9020 |
| cggccgtccagttaccagc | 4849 | gctggtaactggacggccg | 6240 | ctaaagcttcaatggaact | 7631 | agttccattgaagctttag | 9021 |
| ggccgtccagttaccagcc | 4850 | ggctggtaactggacggcc | 6241 | taaagcttcaatggaactt | 7632 | aagttccattgaagcttta | 9022 |
| gccgtccagttaccagccg | 4851 | cggctggtaactggacggc | 6242 | aaagcttcaatggaactta | 7633 | taagttccattgaagcttt | 9023 |
| ccgtccagttaccagccgc | 4852 | gcggctggtaactggacgg | 6243 | aagcttcaatggaacttaa | 7634 | ttaagttccattgaagctt | 9024 |
| cgtccagttaccagccgcc | 4853 | ggcggctggtaactggacg | 6244 | agcttcaatggaacttaaa | 7635 | tttaagttccattgaagct | 9025 |
| gtccagttaccagccgccc | 4854 | gggcggctggtaactggac | 6245 | gcttcaatggaacttaaac | 7636 | gtttaagttccattgaagc | 9026 |
| tccagttaccagccgcccc | 4855 | ggggcggctggtaactgga | 6246 | cttcaatggaacttaaact | 7637 | agtttaagttccattgaag | 9027 |
| ccagttaccagccgcccct | 4856 | aggggcggctggtaactgg | 6247 | ttcaatggaacttaaactc | 7638 | gagtttaagttccattgaa | 9028 |
| cagttaccagccgcccctg | 4857 | caggggcggctggtaactg | 6248 | tcaatggaacttaaactct | 7639 | agagtttaagttccattga | 9029 |
| agttaccagccgcccctgc | 4858 | gcaggggcggctggtaact | 6249 | caatggaacttaaactctg | 7640 | cagagtttaagttccattg | 9030 |
| gttaccagccgcccctgca | 4859 | tgcaggggcggctggtaac | 6250 | aatggaacttaaactctgt | 7641 | acagagtttaagttccatt | 9031 |
| ttaccagccgcccctgcag | 4860 | ctgcaggggcggctggtaa | 6251 | atggaacttaaactctgtt | 7642 | aacagagtttaagttccat | 9032 |
| taccagccgcccctgcaga | 4861 | tctgcaggggcggctggta | 6252 | tggaacttaaactctgttg | 7643 | caacagagtttaagttcca | 9033 |
| accagccgcccctgcagaa | 4862 | ttctgcaggggcggctggt | 6253 | ggaacttaaactctgttga | 7644 | tcaacagagtttaagttcc | 9034 |
| ccagccgcccctgcagaat | 4863 | attctgcaggggcggctgg | 6254 | gaacttaaactctgttgac | 7645 | gtcaacagagtttaagttc | 9035 |
| cagccgcccctgcagaatg | 4864 | cattctgcaggggcggctg | 6255 | aacttaaactctgttgaca | 7646 | tgtcaacagagtttaagtt | 9036 |
| agccgcccctgcagaatgc | 4865 | gcattctgcaggggcggct | 6256 | acttaaactctgttgacaa | 7647 | ttgtcaacagagtttaagt | 9037 |
| gccgcccctgcagaatgcc | 4866 | ggcattctgcaggggcggc | 6257 | cttaaactctgttgacaag | 7648 | cttgtcaacagagtttaag | 9038 |
| ccgcccctgcagaatgcca | 4867 | tggcattctgcaggggcgg | 6258 | ttaaactctgttgacaagc | 7649 | gcttgtcaacagagtttaa | 9039 |
| cgcccctgcagaatgccaa | 4868 | ttggcattctgcaggggcg | 6259 | taaactctgttgacaagcg | 7650 | cgcttgtcaacagagttta | 9040 |
| gcccctgcagaatgccaag | 4869 | cttggcattctgcaggggc | 6260 | aaactctgttgacaagcga | 7651 | tcgcttgtcaacagagttt | 9041 |
| cccctgcagaatgccaaga | 4870 | tcttggcattctgcagggg | 6261 | aactctgttgacaagcgag | 7652 | ctcgcttgtcaacagagtt | 9042 |
| ccctgcagaatgccaagaa | 4871 | ttcttggcattctgcaggg | 6262 | actctgttgacaagcgagt | 7653 | actcgcttgtcaacagagt | 9043 |
| cctgcagaatgccaagaac | 4872 | gttcttggcattctgcagg | 6263 | ctctgttgacaagcgagtg | 7654 | cactcgcttgtcaacagag | 9044 |
| ctgcagaatgccaagaacc | 4873 | ggttcttggcattctgcag | 6264 | tctgttgacaagcgagtgc | 7655 | gcactcgcttgtcaacaga | 9045 |
| tgcagaatgccaagaacca | 4874 | tggttcttggcattctgca | 6265 | ctgttgacaagcgagtgcc | 7656 | ggcactcgcttgtcaacag | 9046 |
| gcagaatgccaagaaccac | 4875 | gtggttcttggcattctgc | 6266 | tgttgacaagcgagtgccg | 7657 | cggcactcgcttgtcaaca | 9047 |
| cagaatgccaagaaccaca | 4876 | tgtggttcttggcattctg | 6267 | gttgacaagcgagtgccgg | 7658 | ccggcactcgcttgtcaac | 9048 |
| agaatgccaagaaccacaa | 4877 | ttgtggttcttggcattct | 6268 | ttgacaagcgagtgccggt | 7659 | accggcactcgcttgtcaa | 9049 |
| gaatgccaagaaccacaac | 4878 | gttgtggttcttggcattc | 6269 | tgacaagcgagtgccggtt | 7660 | aaccggcactcgcttgtca | 9050 |
| aatgccaagaaccacaacc | 4879 | ggttgtggttcttggcatt | 6270 | gacaagcgagtgccggttt | 7661 | aaaccggcactcgcttgtc | 9051 |
| atgccaagaaccacaacca | 4880 | tggttgtggttcttggcat | 6271 | acaagcgagtgccggtttt | 7662 | aaaaccggcactcgcttgt | 9052 |
| tgccaagaaccacaaccat | 4881 | atggttgtggttcttggca | 6272 | caagcgagtgccggttttc | 7663 | gaaaaccggcactcgcttg | 9053 |
| gccaagaaccacaaccatg | 4882 | catggttgtggttcttggc | 6273 | aagcgagtgccggttttca | 7664 | tgaaaaccggcactcgctt | 9054 |
| ccaagaaccacaaccatgc | 4883 | gcatggttgtggttcttgg | 6274 | agcgagtgccggttttcac | 7665 | gtgaaaaccggcactcgct | 9055 |
| caagaaccacaaccatgcg | 4884 | cgcatggttgtggttcttg | 6275 | gcgagtgccggttttcact | 7666 | agtgaaaaccggcactcgc | 9056 |
| aagaaccacaaccatgcgt | 4885 | acgcatggttgtggttctt | 6276 | cgagtgccggttttcactt | 7667 | aagtgaaaaccggcactcg | 9057 |
| agaaccacaaccatgcgtg | 4886 | cacgcatggttgtggttct | 6277 | gagtgccggttttcacttg | 7668 | caagtgaaaaccggcactc | 9058 |
| gaaccacaaccatgcgtgc | 4887 | gcacgcatggttgtggttc | 6278 | agtgccggttttcacttgt | 7669 | acaagtgaaaaccggcact | 9059 |
| aaccacaaccatgcgtgca | 4888 | tgcacgcatggttgtggtt | 6279 | gtgccggttttcacttgtt | 7670 | aacaagtgaaaaccggcac | 9060 |
| accacaaccatgcgtgcat | 4889 | atgcacgcatggttgtggt | 6280 | tgccggttttcacttgttg | 7671 | caacaagtgaaaaccggca | 9061 |
| ccacaaccatgcgtgcata | 4890 | tatgcacgcatggttgtgg | 6281 | gccggttttcacttgttga | 7672 | tcaacaagtgaaaaccggc | 9062 |
| cacaaccatgcgtgcatag | 4891 | ctatgcacgcatggttgtg | 6282 | ccggttttcacttgttgag | 7673 | ctcaacaagtgaaaaccgg | 9063 |
| acaaccatgcgtgcatagc | 4892 | gctatgcacgcatggttgt | 6283 | cggttttcacttgttgaga | 7674 | tctcaacaagtgaaaaccg | 9064 |
| caaccatgcgtgcatagcc | 4893 | ggctatgcacgcatggttg | 6284 | ggttttcacttgttgagaa | 7675 | ttctcaacaagtgaaaacc | 9065 |
| aaccatgcgtgcatagcct | 4894 | aggctatgcacgcatggtt | 6285 | gttttcacttgttgagaag | 7676 | cttctcaacaagtgaaaac | 9066 |
| accatgcgtgcatagcctg | 4895 | caggctatgcacgcatggt | 6286 | ttttcacttgttgagaaga | 7677 | tcttctcaacaagtgaaaa | 9067 |
| ccatgcgtgcatagcctgc | 4896 | gcaggctatgcacgcatgg | 6287 | tttcacttgttgagaagag | 7678 | ctcttctcaacaagtgaaa | 9068 |
| catgcgtgcatagcctgcc | 4897 | ggcaggctatgcacgcatg | 6288 | ttcacttgttgagaagaga | 7679 | tctcttctcaacaagtgaa | 9069 |
| atgcgtgcatagcctgccg | 4898 | cggcaggctatgcacgcat | 6289 | tcacttgttgagaagagat | 7680 | atctcttctcaacaagtga | 9070 |
| tgcgtgcatagcctgccgc | 4899 | gcggcaggctatgcacgca | 6290 | cacttgttgagaagagatg | 7681 | catctcttctcaacaagtg | 9071 |
| gcgtgcatagcctgccgca | 4900 | tgcggcaggctatgcacgc | 6291 | acttgttgagaagagatgt | 7682 | acatctcttctcaacaagt | 9072 |
| cgtgcatagcctgccgcat | 4901 | atgcggcaggctatgcacg | 6292 | cttgttgagaagagatgtg | 7683 | cacatctcttctcaacaag | 9073 |
| gtgcatagcctgccgcatc | 4902 | gatgcggcaggctatgcac | 6293 | ttgttgagaagagatgtgt | 7684 | acacatctcttctcaacaa | 9074 |
| tgcatagcctgccgcatca | 4903 | tgatgcggcaggctatgca | 6294 | tgttgagaagagatgtgtg | 7685 | cacacatctcttctcaaca | 9075 |
| gcatagcctgccgcatcat | 4904 | atgatgcggcaggctatgc | 6295 | gttgagaagagatgtgtgc | 7686 | gcacacatctcttctcaac | 9076 |
| catagcctgccgcatcatt | 4905 | aatgatgcggcaggctatg | 6296 | ttgagaagagatgtgtgcc | 7687 | ggcacacatctcttctcaa | 9077 |
| atagcctgccgcatcattt | 4906 | aaatgatgcggcaggctat | 6297 | tgagaagagatgtgtgcca | 7688 | tggcacacatctcttctca | 9078 |
| tagcctgccgcatcatttt | 4907 | aaaatgatgcggcaggcta | 6298 | gagaagagatgtgtgccat | 7689 | atggcacacatctcttctc | 9079 |
| agcctgccgcatcattttc | 4908 | gaaaatgatgcggcaggct | 6299 | agaagagatgtgtgccata | 7690 | tatggcacacatctcttct | 9080 |
| gcctgccgcatcattttcc | 4909 | ggaaaatgatgcggcaggc | 6300 | gaagagatgtgtgccatat | 7691 | atatggcacacatctcttc | 9081 |
| cctgccgcatcattttccg | 4910 | cggaaaatgatgcggcagg | 6301 | aagagatgtgtgccatata | 7692 | tatatggcacacatctctt | 9082 |
| ctgccgcatcattttccgg | 4911 | ccggaaaatgatgcggcag | 6302 | agagatgtgtgccatatac | 7693 | gtatatggcacacatctct | 9083 |
| tgccgcatcattttccggt | 4912 | accggaaaatgatgcggca | 6303 | gagatgtgtgccatatact | 7694 | agtatatggcacacatctc | 9084 |
| gccgcatcattttccggtc | 4913 | gaccggaaaatgatgcggc | 6304 | agatgtgtgccatatactt | 7695 | aagtatatggcacacatct | 9085 |
| ccgcatcattttccggtca | 4914 | tgaccggaaaatgatgcgg | 6305 | gatgtgtgccatatacttg | 7696 | caagtatatggcacacatc | 9086 |
| cgcatcattttccggtcag | 4915 | ctgaccggaaaatgatgcg | 6306 | atgtgtgccatatacttgg | 7697 | ccaagtatatggcacacat | 9087 |
| gcatcattttccggtcaga | 4916 | tctgaccggaaaatgatgc | 6307 | tgtgtgccatatacttggt | 7698 | accaagtatatggcacaca | 9088 |
| catcattttccggtcagat | 4917 | atctgaccggaaaatgatg | 6308 | gtgtgccatatacttggtt | 7699 | aaccaagtatatggcacac | 9089 |
| atcattttccggtcagatg | 4918 | catctgaccggaaaatgat | 6309 | tgtgccatatacttggttt | 7700 | aaaccaagtatatggcaca | 9090 |
| tcattttccggtcagatga | 4919 | tcatctgaccggaaaatga | 6310 | gtgccatatacttggtttg | 7701 | caaaccaagtatatggcac | 9091 |
| cattttccggtcagatgaa | 4920 | ttcatctgaccggaaaatg | 6311 | tgccatatacttggtttgg | 7702 | ccaaaccaagtatatggca | 9092 |
| attttccggtcagatgaac | 4921 | gttcatctgaccggaaaat | 6312 | gccatatacttggtttggt | 7703 | accaaaccaagtatatggc | 9093 |
| ttttccggtcagatgaaca | 4922 | tgttcatctgaccggaaaa | 6313 | ccatatacttggtttggtg | 7704 | caccaaaccaagtatatgg | 9094 |
| tttccggtcagatgaacac | 4923 | gtgttcatctgaccggaaa | 6314 | catatacttggtttggtgg | 7705 | ccaccaaaccaagtatatg | 9095 |
| ttccggtcagatgaacacc | 4924 | ggtgttcatctgaccggaa | 6315 | atatacttggtttggtggc | 7706 | gccaccaaaccaagtatat | 9096 |
| tccggtcagatgaacacca | 4925 | tggtgttcatctgaccgga | 6316 | tatacttggtttggtggct | 7707 | agccaccaaaccaagtata | 9097 |
| ccggtcagatgaacaccac | 4926 | gtggtgttcatctgaccgg | 6317 | atacttggtttggtggcta | 7708 | tagccaccaaaccaagtat | 9098 |
| cggtcagatgaacaccacc | 4927 | ggtggtgttcatctgaccg | 6318 | tacttggtttggtggctac | 7709 | gtagccaccaaaccaagta | 9099 |
| ggtcagatgaacaccaccc | 4928 | gggtggtgttcatctgacc | 6319 | acttggtttggtggctaca | 7710 | tgtagccaccaaaccaagt | 9100 |
| gtcagatgaacaccaccct | 4929 | agggtggtgttcatctgac | 6320 | cttggtttggtggctacag | 7711 | ctgtagccaccaaaccaag | 9101 |
| tcagatgaacaccaccctc | 4930 | gagggtggtgttcatctga | 6321 | ttggtttggtggctacaga | 7712 | tctgtagccaccaaaccaa | 9102 |
| cagatgaacaccaccctcc | 4931 | ggagggtggtgttcatctg | 6322 | tggtttggtggctacagag | 7713 | ctctgtagccaccaaacca | 9103 |
| agatgaacaccaccctccc | 4932 | gggagggtggtgttcatct | 6323 | ggtttggtggctacagagt | 7714 | actctgtagccaccaaacc | 9104 |
| gatgaacaccaccctccca | 4933 | tgggagggtggtgttcatc | 6324 | gtttggtggctacagagta | 7715 | tactctgtagccaccaaac | 9105 |
| atgaacaccaccctcccat | 4934 | atgggagggtggtgttcat | 6325 | tttggtggctacagagtac | 7716 | gtactctgtagccaccaaa | 9106 |
| tgaacaccaccctcccata | 4935 | tatgggagggtggtgttca | 6326 | ttggtggctacagagtaca | 7717 | tgtactctgtagccaccaa | 9107 |
| gaacaccaccctcccatac | 4936 | gtatgggagggtggtgttc | 6327 | tggtggctacagagtacag | 7718 | ctgtactctgtagccacca | 9108 |
| aacaccaccctcccatact | 4937 | agtatgggagggtggtgtt | 6328 | ggtggctacagagtacagc | 7719 | gctgtactctgtagccacc | 9109 |
| acaccaccctcccatactg | 4938 | cagtatgggagggtggtgt | 6329 | gtggctacagagtacagcc | 7720 | ggctgtactctgtagccac | 9110 |
| caccaccctcccatactgc | 4939 | gcagtatgggagggtggtg | 6330 | tggctacagagtacagcct | 7721 | aggctgtactctgtagcca | 9111 |
| accaccctcccatactgcc | 4940 | ggcagtatgggagggtggt | 6331 | ggctacagagtacagcctg | 7722 | caggctgtactctgtagcc | 9112 |
| ccaccctcccatactgccc | 4941 | gggcagtatgggagggtgg | 6332 | gctacagagtacagcctgc | 7723 | gcaggctgtactctgtagc | 9113 |
| caccctcccatactgcccc | 4942 | ggggcagtatgggagggtg | 6333 | ctacagagtacagcctgct | 7724 | agcaggctgtactctgtag | 9114 |
| accctcccatactgccccc | 4943 | gggggcagtatgggagggt | 6334 | tacagagtacagcctgctg | 7725 | cagcaggctgtactctgta | 9115 |
| ccctcccatactgcccccc | 4944 | ggggggcagtatgggaggg | 6335 | acagagtacagcctgctgc | 7726 | gcagcaggctgtactctgt | 9116 |
| cctcccatactgcccccca | 4945 | tggggggcagtatgggagg | 6336 | cagagtacagcctgctgct | 7727 | agcagcaggctgtactctg | 9117 |
| ctcccatactgccccccaa | 4946 | ttggggggcagtatgggag | 6337 | agagtacagcctgctgctt | 7728 | aagcagcaggctgtactct | 9118 |
| tcccatactgccccccaag | 4947 | cttggggggcagtatggga | 6338 | gagtacagcctgctgctta | 7729 | taagcagcaggctgtactc | 9119 |
| cccatactgccccccaagg | 4948 | ccttggggggcagtatggg | 6339 | agtacagcctgctgcttaa | 7730 | ttaagcagcaggctgtact | 9120 |
| ccatactgccccccaaggc | 4949 | gccttggggggcagtatgg | 6340 | gtacagcctgctgcttaac | 7731 | gttaagcagcaggctgtac | 9121 |
| catactgccccccaaggct | 4950 | agccttggggggcagtatg | 6341 | tacagcctgctgcttaacc | 7732 | ggttaagcagcaggctgta | 9122 |
| atactgccccccaaggctg | 4951 | cagccttggggggcagtat | 6342 | acagcctgctgcttaaccc | 7733 | gggttaagcagcaggctgt | 9123 |
| tactgccccccaaggctga | 4952 | tcagccttggggggcagta | 6343 | cagcctgctgcttaaccct | 7734 | agggttaagcagcaggctg | 9124 |
| actgccccccaaggctgac | 4953 | gtcagccttggggggcagt | 6344 | agcctgctgcttaaccctc | 7735 | gagggttaagcagcaggct | 9125 |
| ctgccccccaaggctgacc | 4954 | ggtcagccttggggggcag | 6345 | gcctgctgcttaaccctca | 7736 | tgagggttaagcagcaggc | 9126 |
| tgccccccaaggctgacct | 4955 | aggtcagccttggggggca | 6346 | cctgctgcttaaccctcag | 7737 | ctgagggttaagcagcagg | 9127 |
| gccccccaaggctgacctg | 4956 | caggtcagccttggggggc | 6347 | ctgctgcttaaccctcaga | 7738 | tctgagggttaagcagcag | 9128 |
| ccccccaaggctgacctga | 4957 | tcaggtcagccttgggggg | 6348 | tgctgcttaaccctcagag | 7739 | ctctgagggttaagcagca | 9129 |
| cccccaaggctgacctgac | 4958 | gtcaggtcagccttggggg | 6349 | gctgcttaaccctcagagg | 7740 | cctctgagggttaagcagc | 9130 |
| ccccaaggctgacctgacc | 4959 | ggtcaggtcagccttgggg | 6350 | ctgcttaaccctcagagga | 7741 | tcctctgagggttaagcag | 9131 |
| cccaaggctgacctgacca | 4960 | tggtcaggtcagccttggg | 6351 | tgcttaaccctcagaggag | 7742 | ctcctctgagggttaagca | 9132 |
| ccaaggctgacctgaccat | 4961 | atggtcaggtcagccttgg | 6352 | gcttaaccctcagaggaga | 7743 | tctcctctgagggttaagc | 9133 |
| caaggctgacctgaccatt | 4962 | aatggtcaggtcagccttg | 6353 | cttaaccctcagaggagac | 7744 | gtctcctctgagggttaag | 9134 |
| aaggctgacctgaccattg | 4963 | caatggtcaggtcagcctt | 6354 | ttaaccctcagaggagact | 7745 | agtctcctctgagggttaa | 9135 |
| aggctgacctgaccattgg | 4964 | ccaatggtcaggtcagcct | 6355 | taaccctcagaggagactg | 7746 | cagtctcctctgagggtta | 9136 |
| ggctgacctgaccattggc | 4965 | gccaatggtcaggtcagcc | 6356 | aaccctcagaggagactga | 7747 | tcagtctcctctgagggtt | 9137 |
| gctgacctgaccattggcc | 4966 | ggccaatggtcaggtcagc | 6357 | accctcagaggagactgat | 7748 | atcagtctcctctgagggt | 9138 |
| ctgacctgaccattggcct | 4967 | aggccaatggtcaggtcag | 6358 | ccctcagaggagactgatc | 7749 | gatcagtctcctctgaggg | 9139 |
| tgacctgaccattggcctc | 4968 | gaggccaatggtcaggtca | 6359 | cctcagaggagactgatcc | 7750 | ggatcagtctcctctgagg | 9140 |
| gacctgaccattggcctcc | 4969 | ggaggccaatggtcaggtc | 6360 | ctcagaggagactgatcca | 7751 | tggatcagtctcctctgag | 9141 |
| acctgaccattggcctcca | 4970 | tggaggccaatggtcaggt | 6361 | tcagaggagactgatccag | 7752 | ctggatcagtctcctctga | 9142 |
| cctgaccattggcctccac | 4971 | gtggaggccaatggtcagg | 6362 | cagaggagactgatccagt | 7753 | actggatcagtctcctctg | 9143 |
| ctgaccattggcctccacg | 4972 | cgtggaggccaatggtcag | 6363 | agaggagactgatccagtt | 7754 | aactggatcagtctcctct | 9144 |
| tgaccattggcctccacgg | 4973 | ccgtggaggccaatggtca | 6364 | gaggagactgatccagttg | 7755 | caactggatcagtctcctc | 9145 |
| gaccattggcctccacggg | 4974 | cccgtggaggccaatggtc | 6365 | aggagactgatccagttgg | 7756 | ccaactggatcagtctcct | 9146 |
| accattggcctccacgggg | 4975 | ccccgtggaggccaatggt | 6366 | ggagactgatccagttggg | 7757 | cccaactggatcagtctcc | 9147 |
| ccattggcctccacgggga | 4976 | tccccgtggaggccaatgg | 6367 | gagactgatccagttggga | 7758 | tcccaactggatcagtctc | 9148 |
| cattggcctccacggggaa | 4977 | ttccccgtggaggccaatg | 6368 | agactgatccagttgggaa | 7759 | ttcccaactggatcagtct | 9149 |
| attggcctccacggggaat | 4978 | attccccgtggaggccaat | 6369 | gactgatccagttgggaaa | 7760 | tttcccaactggatcagtc | 9150 |
| ttggcctccacggggaatg | 4979 | cattccccgtggaggccaa | 6370 | actgatccagttgggaaat | 7761 | atttcccaactggatcagt | 9151 |
| tggcctccacggggaatgg | 4980 | ccattccccgtggaggcca | 6371 | ctgatccagttgggaaatt | 7762 | aatttcccaactggatcag | 9152 |
| ggcctccacggggaatggg | 4981 | cccattccccgtggaggcc | 6372 | tgatccagttgggaaattc | 7763 | gaatttcccaactggatca | 9153 |
| gcctccacggggaatgggt | 4982 | acccattccccgtggaggc | 6373 | gatccagttgggaaattca | 7764 | tgaatttcccaactggatc | 9154 |
| cctccacggggaatgggtg | 4983 | cacccattccccgtggagg | 6374 | atccagttgggaaattcag | 7765 | ctgaatttcccaactggat | 9155 |
| ctccacggggaatgggtga | 4984 | tcacccattccccgtggag | 6375 | tccagttgggaaattcaga | 7766 | tctgaatttcccaactgga | 9156 |
| tccacggggaatgggtgag | 4985 | ctcacccattccccgtgga | 6376 | ccagttgggaaattcagag | 7767 | ctctgaatttcccaactgg | 9157 |
| ccacggggaatgggtgagc | 4986 | gctcacccattccccgtgg | 6377 | cagttgggaaattcagagc | 7768 | gctctgaatttcccaactg | 9158 |
| cacggggaatgggtgagcc | 4987 | ggctcacccattccccgtg | 6378 | agttgggaaattcagagca | 7769 | tgctctgaatttcccaact | 9159 |
| acggggaatgggtgagcca | 4988 | tggctcacccattccccgt | 6379 | gttgggaaattcagagcag | 7770 | ctgctctgaatttcccaac | 9160 |
| cggggaatgggtgagccag | 4989 | ctggctcacccattccccg | 6380 | ttgggaaattcagagcagc | 7771 | gctgctctgaatttcccaa | 9161 |
| ggggaatgggtgagccagc | 4990 | gctggctcacccattcccc | 6381 | tgggaaattcagagcagct | 7772 | agctgctctgaatttccca | 9162 |
| gggaatgggtgagccagcg | 4991 | cgctggctcacccattccc | 6382 | gggaaattcagagcagctc | 7773 | gagctgctctgaatttccc | 9163 |
| ggaatgggtgagccagcgc | 4992 | gcgctggctcacccattcc | 6383 | ggaaattcagagcagctcc | 7774 | ggagctgctctgaatttcc | 9164 |
| gaatgggtgagccagcgct | 4993 | agcgctggctcacccattc | 6384 | gaaattcagagcagctcct | 7775 | aggagctgctctgaatttc | 9165 |
| aatgggtgagccagcgctg | 4994 | cagcgctggctcacccatt | 6385 | aaattcagagcagctcctg | 7776 | caggagctgctctgaattt | 9166 |
| atgggtgagccagcgctgc | 4995 | gcagcgctggctcacccat | 6386 | aattcagagcagctcctgc | 7777 | gcaggagctgctctgaatt | 9167 |
| tgggtgagccagcgctgcg | 4996 | cgcagcgctggctcaccca | 6387 | attcagagcagctcctgct | 7778 | agcaggagctgctctgaat | 9168 |
| gggtgagccagcgctgcga | 4997 | tcgcagcgctggctcaccc | 6388 | ttcagagcagctcctgctc | 7779 | gagcaggagctgctctgaa | 9169 |
| ggtgagccagcgctgcgag | 4998 | ctcgcagcgctggctcacc | 6389 | tcagagcagctcctgctcc | 7780 | ggagcaggagctgctctga | 9170 |
| gtgagccagcgctgcgagg | 4999 | cctcgcagcgctggctcac | 6390 | cagagcagctcctgctcca | 7781 | tggagcaggagctgctctg | 9171 |
| tgagccagcgctgcgaggt | 5000 | acctcgcagcgctggctca | 6391 | agagcagctcctgctccag | 7782 | ctggagcaggagctgctct | 9172 |
| gagccagcgctgcgaggta | 5001 | tacctcgcagcgctggctc | 6392 | gagcagctcctgctccagg | 7783 | cctggagcaggagctgctc | 9173 |
| agccagcgctgcgaggtac | 5002 | gtacctcgcagcgctggct | 6393 | agcagctcctgctccaggc | 7784 | gcctggagcaggagctgct | 9174 |
| gccagcgctgcgaggtacg | 5003 | cgtacctcgcagcgctggc | 6394 | gcagctcctgctccaggca | 7785 | tgcctggagcaggagctgc | 9175 |
| ccagcgctgcgaggtacgc | 5004 | gcgtacctcgcagcgctgg | 6395 | cagctcctgctccaggcag | 7786 | ctgcctggagcaggagctg | 9176 |
| cagcgctgcgaggtacgcc | 5005 | ggcgtacctcgcagcgctg | 6396 | agctcctgctccaggcagc | 7787 | gctgcctggagcaggagct | 9177 |
| agcgctgcgaggtacgccc | 5006 | gggcgtacctcgcagcgct | 6397 | gctcctgctccaggcagcc | 7788 | ggctgcctggagcaggagc | 9178 |
| gcgctgcgaggtacgcccc | 5007 | ggggcgtacctcgcagcgc | 6398 | ctcctgctccaggcagcca | 7789 | tggctgcctggagcaggag | 9179 |
| cgctgcgaggtacgccccg | 5008 | cggggcgtacctcgcagcg | 6399 | tcctgctccaggcagccag | 7790 | ctggctgcctggagcagga | 9180 |
| gctgcgaggtacgccccga | 5009 | tcggggcgtacctcgcagc | 6400 | cctgctccaggcagccaga | 7791 | tctggctgcctggagcagg | 9181 |
| ctgcgaggtacgccccgag | 5010 | ctcggggcgtacctcgcag | 6401 | ctgctccaggcagccagaa | 7792 | ttctggctgcctggagcag | 9182 |
| tgcgaggtacgccccgagg | 5011 | cctcggggcgtacctcgca | 6402 | tgctccaggcagccagaag | 7793 | cttctggctgcctggagca | 9183 |
| gcgaggtacgccccgaggt | 5012 | acctcggggcgtacctcgc | 6403 | gctccaggcagccagaagc | 7794 | gcttctggctgcctggagc | 9184 |
| cgaggtacgccccgaggtc | 5013 | gacctcggggcgtacctcg | 6404 | ctccaggcagccagaagca | 7795 | tgcttctggctgcctggag | 9185 |
| gaggtacgccccgaggtcc | 5014 | ggacctcggggcgtacctc | 6405 | tccaggcagccagaagcag | 7796 | ctgcttctggctgcctgga | 9186 |
| aggtacgccccgaggtcct | 5015 | aggacctcggggcgtacct | 6406 | ccaggcagccagaagcagc | 7797 | gctgcttctggctgcctgg | 9187 |
| ggtacgccccgaggtcctc | 5016 | gaggacctcggggcgtacc | 6407 | caggcagccagaagcagca | 7798 | tgctgcttctggctgcctg | 9188 |
| gtacgccccgaggtcctct | 5017 | agaggacctcggggcgtac | 6408 | aggcagccagaagcagcag | 7799 | ctgctgcttctggctgcct | 9189 |
| tacgccccgaggtcctctt | 5018 | aagaggacctcggggcgta | 6409 | ggcagccagaagcagcagt | 7800 | actgctgcttctggctgcc | 9190 |
| acgccccgaggtcctcttc | 5019 | gaagaggacctcggggcgt | 6410 | gcagccagaagcagcagtg | 7801 | cactgctgcttctggctgc | 9191 |
| cgccccgaggtcctcttcc | 5020 | ggaagaggacctcggggcg | 6411 | cagccagaagcagcagtgg | 7802 | ccactgctgcttctggctg | 9192 |
| gccccgaggtcctcttcct | 5021 | aggaagaggacctcggggc | 6412 | agccagaagcagcagtggg | 7803 | cccactgctgcttctggct | 9193 |
| ccccgaggtcctcttcctc | 5022 | gaggaagaggacctcgggg | 6413 | gccagaagcagcagtgggg | 7804 | ccccactgctgcttctggc | 9194 |
| cccgaggtcctcttcctca | 5023 | tgaggaagaggacctcggg | 6414 | ccagaagcagcagtggggg | 7805 | cccccactgctgcttctgg | 9195 |
| ccgaggtcctcttcctcac | 5024 | gtgaggaagaggacctcgg | 6415 | cataagcagcagtgggggg | 7806 | ccccccactgctgcttctg | 9196 |
| cgaggtcctcttcctcacc | 5025 | ggtgaggaagaggacctcg | 6416 | agaagcagcagtggggggt | 7807 | accccccactgctgcttct | 9197 |
| gaggtcctcttcctcaccc | 5026 | gggtgaggaagaggacctc | 6417 | gaagcagcagtggggggtg | 7808 | caccccccactgctgcttc | 9198 |
| aggtcctcttcctcacccg | 5027 | cgggtgaggaagaggacct | 6418 | aagcagcagtggggggtgg | 7809 | ccaccccccactgctgctt | 9199 |
| ggtcctcttcctcacccgc | 5028 | gcgggtgaggaagaggacc | 6419 | agcagcagtggggggtggg | 7810 | cccaccccccactgctgct | 9200 |
| gtcctcttcctcacccgcc | 5029 | ggcgggtgaggaagaggac | 6420 | gcagcagtggggggtgggg | 7811 | ccccaccccccactgctgc | 9201 |
| tcctcttcctcacccgcca | 5030 | tggcgggtgaggaagagga | 6421 | cagcagtggggggtggggg | 7812 | cccccaccccccactgctg | 9202 |
| cctcttcctcacccgccac | 5031 | gtggcgggtgaggaagagg | 6422 | agcagtggggggtgggggt | 7813 | acccccaccccccactgct | 9203 |
| ctcttcctcacccgccact | 5032 | agtggcgggtgaggaagag | 6423 | gcagtggggggtgggggtg | 7814 | cacccccaccccccactgc | 9204 |
| tcttcctcacccgccactt | 5033 | aagtggcgggtgaggaaga | 6424 | cagtggggggtgggggtgg | 7815 | ccacccccaccccccactg | 9205 |
| cttcctcacccgccacttc | 5034 | gaagtggcgggtgaggaag | 6425 | agtggggggtgggggtggg | 7816 | cccacccccaccccccact | 9206 |
| ttcctcacccgccacttca | 5035 | tgaagtggcgggtgaggaa | 6426 | gtggggggtgggggtgggg | 7817 | ccccacccccaccccccac | 9207 |
| tcctcacccgccacttcat | 5036 | atgaagtggcgggtgagga | 6427 | tggggggtgggggtgggga | 7818 | tccccacccccacccccca | 9208 |
| cctcacccgccacttcatc | 5037 | gatgaagtggcgggtgagg | 6428 | ggggggtgggggtggggat | 7819 | atccccacccccacccccc | 9209 |
| ctcacccgccacttcatct | 5038 | agatgaagtggcgggtgag | 6429 | gggggtgggggtggggatt | 7820 | aatccccacccccaccccc | 9210 |
| tcacccgccacttcatctt | 5039 | aagatgaagtggcgggtga | 6430 | ggggtgggggtggggattc | 7821 | gaatccccacccccacccc | 9211 |
| cacccgccacttcatcttc | 5040 | gaagatgaagtggcgggtg | 6431 | gggtgggggtggggattcc | 7822 | ggaatccccacccccaccc | 9212 |
| acccgccacttcatcttcc | 5041 | ggaagatgaagtggcgggt | 6432 | ggtgggggtggggattcct | 7823 | aggaatccccacccccacc | 9213 |
| cccgccacttcatcttcca | 5042 | tggaagatgaagtggcggg | 6433 | gtgggggtggggattcctt | 7824 | aaggaatccccacccccac | 9214 |
| ccgccacttcatcttccac | 5043 | gtggaagatgaagtggcgg | 6434 | tgggggtggggattccttg | 7825 | caaggaatccccaccccca | 9215 |
| cgccacttcatcttccacg | 5044 | cgtggaagatgaagtggcg | 6435 | gggggtggggattccttgt | 7826 | acaaggaatccccaccccc | 9216 |
| gccacttcatcttccacga | 5045 | tcgtggaagatgaagtggc | 6436 | ggggtggggattccttgtg | 7827 | cacaaggaatccccacccc | 9217 |
| ccacttcatcttccacgac | 5046 | gtcgtggaagatgaagtgg | 6437 | gggtggggattccttgtgt | 7828 | acacaaggaatccccaccc | 9218 |
| cacttcatcttccacgaca | 5047 | tgtcgtggaagatgaagtg | 6438 | ggtggggattccttgtgtt | 7829 | aacacaaggaatccccacc | 9219 |
| acttcatcttccacgacaa | 5048 | ttgtcgtggaagatgaagt | 6439 | gtggggattccttgtgtta | 7830 | taacacaaggaatccccac | 9220 |
| cttcatcttccacgacaac | 5049 | gttgtcgtggaagatgaag | 6440 | tggggattccttgtgttaa | 7831 | ttaacacaaggaatcccca | 9221 |
| ttcatcttccacgacaaca | 5050 | tgttgtcgtggaagatgaa | 6441 | ggggattccttgtgttaag | 7832 | cttaacacaaggaatcccc | 9222 |
| tcatcttccacgacaacaa | 5051 | ttgttgtcgtggaagatga | 6442 | gggattccttgtgttaagt | 7833 | acttaacacaaggaatccc | 9223 |
| catcttccacgacaacaac | 5052 | gttgttgtcgtggaagatg | 6443 | ggattccttgtgttaagtg | 7834 | cacttaacacaaggaatcc | 9224 |
| atcttccacgacaacaaca | 5053 | tgttgttgtcgtggaagat | 6444 | gattccttgtgttaagtgc | 7835 | gcacttaacacaaggaatc | 9225 |
| tcttccacgacaacaacaa | 5054 | ttgttgttgtcgtggaaga | 6445 | attccttgtgttaagtgcc | 7836 | ggcacttaacacaaggaat | 9226 |
| cttccacgacaacaacaac | 5055 | gttgttgttgtcgtggaag | 6446 | ttccttgtgttaagtgcca | 7837 | tggcacttaacacaaggaa | 9227 |
| ttccacgacaacaacaaca | 5056 | tgttgttgttgtcgtggaa | 6447 | tccttgtgttaagtgccac | 7838 | gtggcacttaacacaagga | 9228 |
| tccacgacaacaacaacac | 5057 | gtgttgttgttgtcgtgga | 6448 | ccttgtgttaagtgccaca | 7839 | tgtggcacttaacacaagg | 9229 |
| ccacgacaacaacaacacc | 5058 | ggtgttgttgttgtcgtgg | 6449 | cttgtgttaagtgccacac | 7840 | gtgtggcacttaacacaag | 9230 |
| cacgacaacaacaacacct | 5059 | aggtgttgttgttgtcgtg | 6450 | ttgtgttaagtgccacaca | 7841 | tgtgtggcacttaacacaa | 9231 |
| acgacaacaacaacacctg | 5060 | caggtgttgttgttgtcgt | 6451 | tgtgttaagtgccacacaa | 7842 | ttgtgtggcacttaacaca | 9232 |
| cgacaacaacaacacctgg | 5061 | ccaggtgttgttgttgtcg | 6452 | gtgttaagtgccacacaac | 7843 | gttgtgtggcacttaacac | 9233 |
| gacaacaacaacacctggg | 5062 | cccaggtgttgttgttgtc | 6453 | tgttaagtgccacacaact | 7844 | agttgtgtggcacttaaca | 9234 |
| acaacaacaacacctggga | 5063 | tcccaggtgttgttgttgt | 6454 | gttaagtgccacacaactg | 7845 | cagttgtgtggcacttaac | 9235 |
| caacaacaacacctgggaa | 5064 | ttcccaggtgttgttgttg | 6455 | ttaagtgccacacaactga | 7846 | tcagttgtgtggcacttaa | 9236 |
| aacaacaacacctgggaag | 5065 | cttcccaggtgttgttgtt | 6456 | taagtgccacacaactgac | 7847 | gtcagttgtgtggcactta | 9237 |
| acaacaacacctgggaagg | 5066 | ccttcccaggtgttgttgt | 6457 | aagtgccacacaactgaca | 7848 | tgtcagttgtgtggcactt | 9238 |
| caacaacacctgggaaggg | 5067 | cccttcccaggtgttgttg | 6458 | agtgccacacaactgacaa | 7849 | ttgtcagttgtgtggcact | 9239 |
| aacaacacctgggaagggc | 5068 | gcccttcccaggtgttgtt | 6459 | gtgccacacaactgacaag | 7850 | cttgtcagttgtgtggcac | 9240 |
| acaacacctgggaagggca | 5069 | tgcccttcccaggtgttgt | 6460 | tgccacacaactgacaagg | 7851 | ccttgtcagttgtgtggca | 9241 |
| caacacctgggaagggcat | 5070 | atgcccttcccaggtgttg | 6461 | gccacacaactgacaagga | 7852 | tccttgtcagttgtgtggc | 9242 |
| aacacctgggaagggcatt | 5071 | aatgcccttcccaggtgtt | 6462 | ccacacaactgacaaggag | 7853 | ctccttgtcagttgtgtgg | 9243 |
| acacctgggaagggcatta | 5072 | taatgcccttcccaggtgt | 6463 | cacacaactgacaaggaga | 7854 | tctccttgtcagttgtgtg | 9244 |
| cacctgggaagggcattac | 5073 | gtaatgcccttcccaggtg | 6464 | acacaactgacaaggagat | 7855 | atctccttgtcagttgtgt | 9245 |
| acctgggaagggcattact | 5074 | agtaatgcccttcccaggt | 6465 | cacaactgacaaggagatc | 7856 | gatctccttgtcagttgtg | 9246 |
| cctgggaagggcattacta | 5075 | tagtaatgcccttcccagg | 6466 | acaactgacaaggagatct | 7857 | agatctccttgtcagttgt | 9247 |
| ctgggaagggcattactac | 5076 | gtagtaatgcccttcccag | 6467 | caactgacaaggagatctg | 7858 | cagatctccttgtcagttg | 9248 |
| tgggaagggcattactacc | 5077 | ggtagtaatgcccttccca | 6468 | aactgacaaggagatctgt | 7859 | acagatctccttgtcagtt | 9249 |
| gggaagggcattactacca | 5078 | tggtagtaatgcccttccc | 6469 | actgacaaggagatctgtg | 7860 | cacagatctccttgtcagt | 9250 |
| ggaagggcattactaccac | 5079 | gtggtagtaatgcccttcc | 6470 | ctgacaaggagatctgtgg | 7861 | ccacagatctccttgtcag | 9251 |
| gaagggcattactaccact | 5080 | agtggtagtaatgcccttc | 6471 | tgacaaggagatctgtgga | 7862 | tccacagatctccttgtca | 9252 |
| aagggcattactaccacta | 5081 | tagtggtagtaatgccctt | 6472 | gacaaggagatctgtggag | 7863 | ctccacagatctccttgtc | 9253 |
| agggcattactaccactac | 5082 | gtagtggtagtaatgccct | 6473 | acaaggagatctgtggagt | 7864 | actccacagatctccttgt | 9254 |
| gggcattactaccactact | 5083 | agtagtggtagtaatgccc | 6474 | caaggagatctgtggagtt | 7865 | aactccacagatctccttg | 9255 |
| ggcattactaccactactc | 5084 | gagtagtggtagtaatgcc | 6475 | aaggagatctgtggagttt | 7866 | aaactccacagatctcctt | 9256 |
| gcattactaccactactca | 5085 | tgagtagtggtagtaatgc | 6476 | aggagatctgtggagtttt | 7867 | aaaactccacagatctcct | 9257 |
| cattactaccactactcag | 5086 | ctgagtagtggtagtaatg | 6477 | ggagatctgtggagttttt | 7868 | aaaaactccacagatctcc | 9258 |
| attactaccactactcaga | 5087 | tctgagtagtggtagtaat | 6478 | gagatctgtggagtttttc | 7869 | gaaaaactccacagatctc | 9259 |
| ttactaccactactcagac | 5088 | gtctgagtagtggtagtaa | 6479 | agatctgtggagtttttct | 7870 | agaaaaactccacagatct | 9260 |
| tactaccactactcagacc | 5089 | ggtctgagtagtggtagta | 6480 | gatctgtggagtttttctc | 7871 | gagaaaaactccacagatc | 9261 |
| actaccactactcagaccc | 5090 | gggtctgagtagtggtagt | 6481 | atctgtggagtttttctcc | 7872 | ggagaaaaactccacagat | 9262 |
| ctaccactactcagaccct | 5091 | agggtctgagtagtggtag | 6482 | tctgtggagtttttctcca | 7873 | tggagaaaaactccacaga | 9263 |
| taccactactcagaccctg | 5092 | cagggtctgagtagtggta | 6483 | ctgtggagtttttctccaa | 7874 | ttggagaaaaactccacag | 9264 |
| accactactcagaccctgt | 5093 | acagggtctgagtagtggt | 6484 | tgtggagtttttctccaag | 7875 | cttggagaaaaactccaca | 9265 |
| ccactactcagaccctgtc | 5094 | gacagggtctgagtagtgg | 6485 | gtggagtttttctccaagt | 7876 | acttggagaaaaactccac | 9266 |
| cactactcagaccctgtct | 5095 | agacagggtctgagtagtg | 6486 | tggagtttttctccaagtg | 7877 | cacttggagaaaaactcca | 9267 |
| actactcagaccctgtctg | 5096 | cagacagggtctgagtagt | 6487 | ggagtttttctccaagtga | 7878 | tcacttggagaaaaactcc | 9268 |
| ctactcagaccctgtctgc | 5097 | gcagacagggtctgagtag | 6488 | gagtttttctccaagtgaa | 7879 | ttcacttggagaaaaactc | 9269 |
| tactcagaccctgtctgca | 5098 | tgcagacagggtctgagta | 6489 | agtttttctccaagtgaac | 7880 | gttcacttggagaaaaact | 9270 |
| actcagaccctgtctgcaa | 5099 | ttgcagacagggtctgagt | 6490 | gtttttctccaagtgaacc | 7881 | ggttcacttggagaaaaac | 9271 |
| ctcagaccctgtctgcaag | 5100 | cttgcagacagggtctgag | 6491 | tttttctccaagtgaacca | 7882 | tggttcacttggagaaaaa | 9272 |
| tcagaccctgtctgcaagc | 5101 | gcttgcagacagggtctga | 6492 | ttttctccaagtgaaccaa | 7883 | ttggttcacttggagaaaa | 9273 |
| cagaccctgtctgcaagca | 5102 | tgcttgcagacagggtctg | 6493 | tttctccaagtgaaccaat | 7884 | attggttcacttggagaaa | 9274 |
| agaccctgtctgcaagcac | 5103 | gtgcttgcagacagggtct | 6494 | ttctccaagtgaaccaatc | 7885 | gattggttcacttggagaa | 9275 |
| gaccctgtctgcaagcacc | 5104 | ggtgcttgcagacagggtc | 6495 | tctccaagtgaaccaatcc | 7886 | ggattggttcacttggaga | 9276 |
| accctgtctgcaagcaccc | 5105 | gggtgcttgcagacagggt | 6496 | ctccaagtgaaccaatccc | 7887 | gggattggttcacttggag | 9277 |
| ccctgtctgcaagcacccc | 5106 | ggggtgcttgcagacaggg | 6497 | tccaagtgaaccaatcccc | 7888 | ggggattggttcacttgga | 9278 |
| cctgtctgcaagcacccca | 5107 | tggggtgcttgcagacagg | 6498 | ccaagtgaaccaatcccct | 7889 | aggggattggttcacttgg | 9279 |
| ctgtctgcaagcaccccac | 5108 | gtggggtgcttgcagacag | 6499 | caagtgaaccaatcccctg | 7890 | caggggattggttcacttg | 9280 |
| tgtctgcaagcaccccaca | 5109 | tgtggggtgcttgcagaca | 6500 | aagtgaaccaatcccctgt | 7891 | acaggggattggttcactt | 9281 |
| gtctgcaagcaccccacat | 5110 | atgtggggtgcttgcagac | 6501 | agtgaaccaatcccctgtg | 7892 | cacaggggattggttcact | 9282 |
| tctgcaagcaccccacatt | 5111 | aatgtggggtgcttgcaga | 6502 | gtgaaccaatcccctgtgt | 7893 | acacaggggattggttcac | 9283 |
| ctgcaagcaccccacattc | 5112 | gaatgtggggtgcttgcag | 6503 | tgaaccaatcccctgtgtc | 7894 | gacacaggggattggttca | 9284 |
| tgcaagcaccccacattca | 5113 | tgaatgtggggtgcttgca | 6504 | gaaccaatcccctgtgtcc | 7895 | ggacacaggggattggttc | 9285 |
| gcaagcaccccacattcac | 5114 | gtgaatgtggggtgcttgc | 6505 | aaccaatcccctgtgtcct | 7896 | aggacacaggggattggtt | 9286 |
| caagcaccccacattcacc | 5115 | ggtgaatgtggggtgcttg | 6506 | accaatcccctgtgtcctg | 7897 | caggacacaggggattggt | 9287 |
| aagcaccccacattcacca | 5116 | tggtgaatgtggggtgctt | 6507 | ccaatcccctgtgtcctgg | 7898 | ccaggacacaggggattgg | 9288 |
| agcaccccacattcaccat | 5117 | atggtgaatgtggggtgct | 6508 | caatcccctgtgtcctggc | 7899 | gccaggacacaggggattg | 9289 |
| gcaccccacattcaccatc | 5118 | gatggtgaatgtggggtgc | 6509 | aatcccctgtgtcctggct | 7900 | agccaggacacaggggatt | 9290 |
| caccccacattcaccatct | 5119 | agatggtgaatgtggggtg | 6510 | atcccctgtgtcctggctc | 7901 | gagccaggacacaggggat | 9291 |
| accccacattcaccatcta | 5120 | tagatggtgaatgtggggt | 6511 | tcccctgtgtcctggctca | 7902 | tgagccaggacacagggga | 9292 |
| ccccacattcaccatctac | 5121 | gtagatggtgaatgtgggg | 6512 | cccctgtgtcctggctcac | 7903 | gtgagccaggacacagggg | 9293 |
| cccacattcaccatctacg | 5122 | cgtagatggtgaatgtggg | 6513 | ccctgtgtcctggctcaca | 7904 | tgtgagccaggacacaggg | 9294 |
| ccacattcaccatctacgc | 5123 | gcgtagatggtgaatgtgg | 6514 | cctgtgtcctggctcacac | 7905 | gtgtgagccaggacacagg | 9295 |
| cacattcaccatctacgct | 5124 | agcgtagatggtgaatgtg | 6515 | ctgtgtcctggctcacact | 7906 | agtgtgagccaggacacag | 9296 |
| acattcaccatctacgctc | 5125 | gagcgtagatggtgaatgt | 6516 | tgtgtcctggctcacactg | 7907 | cagtgtgagccaggacaca | 9297 |
| cattcaccatctacgctcg | 5126 | cgagcgtagatggtgaatg | 6517 | gtgtcctggctcacactgt | 7908 | acagtgtgagccaggacac | 9298 |
| attcaccatctacgctcga | 5127 | tcgagcgtagatggtgaat | 6518 | tgtcctggctcacactgtg | 7909 | cacagtgtgagccaggaca | 9299 |
| ttcaccatctacgctcgag | 5128 | ctcgagcgtagatggtgaa | 6519 | gtcctggctcacactgtgg | 7910 | ccacagtgtgagccaggac | 9300 |
| tcaccatctacgctcgagg | 5129 | cctcgagcgtagatggtga | 6520 | tcctggctcacactgtggt | 7911 | accacagtgtgagccagga | 9301 |
| caccatctacgctcgaggc | 5130 | gcctcgagcgtagatggtg | 6521 | cctggctcacactgtggtt | 7912 | aaccacagtgtgagccagg | 9302 |
| accatctacgctcgaggcc | 5131 | ggcctcgagcgtagatggt | 6522 | ctggctcacactgtggtta | 7913 | taaccacagtgtgagccag | 9303 |
| ccatctacgctcgaggccg | 5132 | cggcctcgagcgtagatgg | 6523 | tggctcacactgtggttag | 7914 | ctaaccacagtgtgagcca | 9304 |
| catctacgctcgaggccgc | 5133 | gcggcctcgagcgtagatg | 6524 | ggctcacactgtggttagg | 7915 | cctaaccacagtgtgagcc | 9305 |
| atctacgctcgaggccgct | 5134 | agcggcctcgagcgtagat | 6525 | gctcacactgtggttaggg | 7916 | ccctaaccacagtgtgagc | 9306 |
| tctacgctcgaggccgcta | 5135 | tagcggcctcgagcgtaga | 6526 | ctcacactgtggttagggt | 7917 | accctaaccacagtgtgag | 9307 |
| ctacgctcgaggccgctac | 5136 | gtagcggcctcgagcgtag | 6527 | tcacactgtggttagggtg | 7918 | caccctaaccacagtgtga | 9308 |
| tacgctcgaggccgctaca | 5137 | tgtagcggcctcgagcgta | 6528 | cacactgtggttagggtgg | 7919 | ccaccctaaccacagtgtg | 9309 |
| acgctcgaggccgctacag | 5138 | ctgtagcggcctcgagcgt | 6529 | acactgtggttagggtggg | 7920 | cccaccctaaccacagtgt | 9310 |
| cgctcgaggccgctacagc | 5139 | gctgtagcggcctcgagcg | 6530 | cactgtggttagggtgggc | 7921 | gcccaccctaaccacagtg | 9311 |
| gctcgaggccgctacagcc | 5140 | ggctgtagcggcctcgagc | 6531 | actgtggttagggtgggca | 7922 | tgcccaccctaaccacagt | 9312 |
| ctcgaggccgctacagccg | 5141 | cggctgtagcggcctcgag | 6532 | ctgtggttagggtgggcac | 7923 | gtgcccaccctaaccacag | 9313 |
| tcgaggccgctacagccgc | 5142 | gcggctgtagcggcctcga | 6533 | tgtggttagggtgggcaca | 7924 | tgtgcccaccctaaccaca | 9314 |
| cgaggccgctacagccgcg | 5143 | cgcggctgtagcggcctcg | 6534 | gtggttagggtgggcacat | 7925 | atgtgcccaccctaaccac | 9315 |
| gaggccgctacagccgcgg | 5144 | ccgcggctgtagcggcctc | 6535 | tggttagggtgggcacatc | 7926 | gatgtgcccaccctaacca | 9316 |
| aggccgctacagccgcggt | 5145 | accgcggctgtagcggcct | 6536 | ggttagggtgggcacatcc | 7927 | ggatgtgcccaccctaacc | 9317 |
| ggccgctacagccgcggtg | 5146 | caccgcggctgtagcggcc | 6537 | gttagggtgggcacatcca | 7928 | tggatgtgcccaccctaac | 9318 |
| gccgctacagccgcggtgt | 5147 | acaccgcggctgtagcggc | 6538 | ttagggtgggcacatccac | 7929 | gtggatgtgcccaccctaa | 9319 |
| ccgctacagccgcggtgtg | 5148 | cacaccgcggctgtagcgg | 6539 | tagggtgggcacatccact | 7930 | agtggatgtgcccacccta | 9320 |
| cgctacagccgcggtgtgc | 5149 | gcacaccgcggctgtagcg | 6540 | agggtgggcacatccactc | 7931 | gagtggatgtgcccaccct | 9321 |
| gctacagccgcggtgtgct | 5150 | agcacaccgcggctgtagc | 6541 | gggtgggcacatccactct | 7932 | agagtggatgtgcccaccc | 9322 |
| ctacagccgcggtgtgctc | 5151 | gagcacaccgcggctgtag | 6542 | ggtgggcacatccactctg | 7933 | cagagtggatgtgcccacc | 9323 |
| tacagccgcggtgtgctct | 5152 | agagcacaccgcggctgta | 6543 | gtgggcacatccactctgc | 7934 | gcagagtggatgtgcccac | 9324 |
| acagccgcggtgtgctctc | 5153 | gagagcacaccgcggctgt | 6544 | tgggcacatccactctgcc | 7935 | ggcagagtggatgtgccca | 9325 |
| cagccgcggtgtgctctca | 5154 | tgagagcacaccgcggctg | 6545 | gggcacatccactctgcca | 7936 | tggcagagtggatgtgccc | 9326 |
| agccgcggtgtgctctcat | 5155 | atgagagcacaccgcggct | 6546 | ggcacatccactctgccat | 7937 | atggcagagtggatgtgcc | 9327 |
| gccgcggtgtgctctcatc | 5156 | gatgagagcacaccgcggc | 6547 | gcacatccactctgccatc | 7938 | gatggcagagtggatgtgc | 9328 |
| ccgcggtgtgctctcatct | 5157 | agatgagagcacaccgcgg | 6548 | cacatccactctgccatct | 7939 | agatggcagagtggatgtg | 9329 |
| cgcggtgtgctctcatcta | 5158 | tagatgagagcacaccgcg | 6549 | acatccactctgccatctt | 7940 | aagatggcagagtggatgt | 9330 |
| gcggtgtgctctcatctaa | 5159 | ttagatgagagcacaccgc | 6550 | catccactctgccatcttt | 7941 | aaagatggcagagtggatg | 9331 |
| cggtgtgctctcatctaag | 5160 | cttagatgagagcacaccg | 6551 | atccactctgccatcttta | 7942 | taaagatggcagagtggat | 9332 |
| ggtgtgctctcatctaagg | 5161 | ccttagatgagagcacacc | 6552 | tccactctgccatctttaa | 7943 | ttaaagatggcagagtgga | 9333 |
| gtgtgctctcatctaaggt | 5162 | accttagatgagagcacac | 6553 | ccactctgccatctttaac | 7944 | gttaaagatggcagagtgg | 9334 |
| tgtgctctcatctaaggtc | 5163 | gaccttagatgagagcaca | 6554 | cactctgccatctttaaca | 7945 | tgttaaagatggcagagtg | 9335 |
| gtgctctcatctaaggtca | 5164 | tgaccttagatgagagcac | 6555 | actctgccatctttaacac | 7946 | gtgttaaagatggcagagt | 9336 |
| tgctctcatctaaggtcat | 5165 | atgaccttagatgagagca | 6556 | ctctgccatctttaacaca | 7947 | tgtgttaaagatggcagag | 9337 |
| gctctcatctaaggtcatg | 5166 | catgaccttagatgagagc | 6557 | tctgccatctttaacacac | 7948 | gtgtgttaaagatggcaga | 9338 |
| ctctcatctaaggtcatgg | 5167 | ccatgaccttagatgagag | 6558 | | | | |

[0162] In a further embodiment, an siRNA directed to human APCDD1L can comprise any one of SEQ ID NOS: 9339-9716. Table 3 lists siRNA sequences comprising SEQ ID NOS: 9339-9716.

TABLE 3
List of siRNAs directed to human APCDD1L.

| | SEQ | | |
|---|---|---|---|
| | ID | | SEQ |
| Sense (5′-3′) | NO: | Anti-sense (5′-3′) | ID NO: |
| acaactatcaacagccggg | 9339 | cccggctgttgatagttgt | 9528 |
| caactatcaacagccggga | 9340 | tcccggctgttgatagttg | 9529 |
| aactatcaacagccgggaa | 9341 | ttcccggctgttgatagtt | 9530 |
| actatcaacagccgggaag | 9342 | cttcccggctgttgatagt | 9531 |
| ctatcaacagccgggaagg | 9343 | ccttcccggctgttgatag | 9532 |
| tatcaacagccgggaaggc | 9344 | gccttcccggctgttgata | 9533 |
| atcaacagccgggaaggct | 9345 | agccttcccggctgttgat | 9534 |
| tcaacagccgggaaggctg | 9346 | cagccttcccggctgttga | 9535 |
| caacagccgggaaggctga | 9347 | tcagccttcccggctgttg | 9536 |
| aacagccgggaaggctgag | 9348 | ctcagccttcccggctgtt | 9537 |
| acagccgggaaggctgagc | 9349 | gctcagccttcccggctgt | 9538 |
| cagccgggaaggctgagcg | 9350 | cgctcagccttcccggctg | 9539 |
| agccgggaaggctgagcgc | 9351 | gcgctcagccttcccggct | 9540 |
| gccgggaaggctgagcgcg | 9352 | cgcgctcagccttcccggc | 9541 |
| ccgggaaggctgagcgcgt | 9353 | acgcgctcagccttcccgg | 9542 |
| cgggaaggctgagcgcgtg | 9354 | cacgcgctcagccttcccg | 9543 |
| gggaaggctgagcgcgtgt | 9355 | acacgcgctcagccttccc | 9544 |
| ggaaggctgagcgcgtgtg | 9356 | cacacgcgctcagccttcc | 9545 |
| gaaggctgagcgcgtgtga | 9357 | tcacacgcgctcagccttc | 9546 |
| aaggctgagcgcgtgtgag | 9358 | ctcacacgcgctcagcctt | 9547 |
| aggctgagcgcgtgtgagc | 9359 | gctcacacgcgctcagcct | 9548 |
| ggctgagcgcgtgtgagcg | 9360 | cgctcacacgcgctcagcc | 9549 |
| gctgagcgcgtgtgagcgc | 9361 | gcgctcacacgcgctcagc | 9550 |
| ctgagcgcgtgtgagcgcc | 9362 | ggcgctcacacgcgctcag | 9551 |
| tgagcgcgtgtgagcgccg | 9363 | cggcgctcacacgcgctca | 9552 |
| gagcgcgtgtgagcgccga | 9364 | tcggcgctcacacgcgctc | 9553 |
| agcgcgtgtgagcgccgag | 9365 | ctcggcgctcacacgcgct | 9554 |
| gcgcgtgtgagcgccgagg | 9366 | cctcggcgctcacacgcgc | 9555 |
| cgcgtgtgagcgccgaggg | 9367 | ccctcggcgctcacacgcg | 9556 |
| gcgtgtgagcgccgagggg | 9368 | cccctcggcgctcacacgc | 9557 |
| cgtgtgagcgccgaggggg | 9369 | ccccctcggcgctcacacg | 9558 |
| gtgtgagcgccgagggggg | 9370 | cccccctcggcgctcacac | 9559 |
| tgtgagcgccgaggggggc | 9371 | gcccccctcggcgctcaca | 9560 |
| gtgagcgccgaggggggcg | 9372 | cgcccccctcggcgctcac | 9561 |
| tgagcgccgaggggggcgc | 9373 | gcgcccccctcggcgctca | 9562 |
| gagcgccgaggggggcgca | 9374 | tgcgcccccctcggcgctc | 9563 |
| agcgccgaggggggcgcag | 9375 | ctgcgcccccctcggcgct | 9564 |
| gcgccgaggggggcgcagg | 9376 | cctgcgcccccctcggcgc | 9565 |
| cgccgaggggggcgcagga | 9377 | tcctgcgcccccctcggcg | 9566 |
| gccgaggggggcgcaggac | 9378 | gtcctgcgcccccctcggc | 9567 |
| ccgaggggggcgcaggacc | 9379 | ggtcctgcgcccccctcgg | 9568 |
| cgaggggggcgcaggaccc | 9380 | gggtcctgcgcccccctcg | 9569 |
| gaggggggcgcaggaccct | 9381 | agggtcctgcgcccccctc | 9570 |
| aggggggcgcaggaccctc | 9382 | gagggtcctgcgcccccct | 9571 |
| ggggggcgcaggaccctcg | 9383 | cgagggtcctgcgcccccc | 9572 |
| gggggcgcaggaccctcgc | 9384 | gcgagggtcctgcgccccc | 9573 |
| ggggcgcaggaccctcgca | 9385 | tgcgagggtcctgcgcccc | 9574 |
| gggcgcaggaccctcgcaa | 9386 | ttgcgagggtcctgcgccc | 9575 |
| ggcgcaggaccctcgcaac | 9387 | gttgcgagggtcctgcgcc | 9576 |
| gcgcaggaccctcgcaact | 9388 | agttgcgagggtcctgcgc | 9577 |
| cgcaggaccctcgcaactt | 9389 | aagttgcgagggtcctgcg | 9578 |
| gcaggaccctcgcaacttc | 9390 | gaagttgcgagggtcctgc | 9579 |
| caggaccctcgcaacttct | 9391 | agaagttgcgagggtcctg | 9580 |
| aggaccctcgcaacttctt | 9392 | aagaagttgcgagggtcct | 9581 |
| ggaccctcgcaacttcttc | 9393 | gaagaagttgcgagggtcc | 9582 |
| gaccctcgcaacttcttcg | 9394 | cgaagaagttgcgagggtc | 9583 |
| accctcgcaacttcttcgc | 9395 | gcgaagaagttgcgagggt | 9584 |
| ccctcgcaacttcttcgca | 9396 | tgcgaagaagttgcgaggg | 9585 |
| cctcgcaacttcttcgcag | 9397 | ctgcgaagaagttgcgagg | 9586 |
| ctcgcaacttcttcgcagg | 9398 | cctgcgaagaagttgcgag | 9587 |
| tcgcaacttcttcgcagga | 9399 | tcctgcgaagaagttgcga | 9588 |
| cgcaacttcttcgcaggac | 9400 | gtcctgcgaagaagttgcg | 9589 |
| gcaacttcttcgcaggact | 9401 | agtcctgcgaagaagttgc | 9590 |
| caacttcttcgcaggactc | 9402 | gagtcctgcgaagaagttg | 9591 |
| aacttcttcgcaggactcc | 9403 | ggagtcctgcgaagaagtt | 9592 |
| acttcttcgcaggactcca | 9404 | tggagtcctgcgaagaagt | 9593 |
| cttcttcgcaggactccag | 9405 | ctggagtcctgcgaagaag | 9594 |
| ttcttcgcaggactccagc | 9406 | gctggagtcctgcgaagaa | 9595 |
| tcttcgcaggactccagcc | 9407 | ggctggagtcctgcgaaga | 9596 |
| cttcgcaggactccagcct | 9408 | aggctggagtcctgcgaag | 9597 |
| ttcgcaggactccagcctg | 9409 | caggctggagtcctgcgaa | 9598 |
| tcgcaggactccagcctgg | 9410 | ccaggctggagtcctgcga | 9599 |
| cgcaggactccagcctggc | 9411 | gccaggctggagtcctgcg | 9600 |
| gcaggactccagcctggcc | 9412 | ggccaggctggagtcctgc | 9601 |
| caggactccagcctggccg | 9413 | cggccaggctggagtcctg | 9602 |
| aggactccagcctggccgc | 9414 | gcggccaggctggagtcct | 9603 |
| ggactccagcctggccgcc | 9415 | ggcggccaggctggagtcc | 9604 |
| gactccagcctggccgccg | 9416 | cggcggccaggctggagtc | 9605 |
| actccagcctggccgccgg | 9417 | ccggcggccaggctggagt | 9606 |
| ctccagcctggccgccggc | 9418 | gccggcggccaggctggag | 9607 |
| tccagcctggccgccggcg | 9419 | cgccggcggccaggctgga | 9608 |
| ccagcctggccgccggcgc | 9420 | gcgccggcggccaggctgg | 9609 |
| cagcctggccgccggcgcc | 9421 | ggcgccggcggccaggctg | 9610 |
| agcctggccgccggcgccc | 9422 | gggcgccggcggccaggct | 9611 |
| gcctggccgccggcgcccg | 9423 | cgggcgccggcggccaggc | 9612 |
| cctggccgccggcgcccgc | 9424 | gcgggcgccggcggccagg | 9613 |
| ctggccgccggcgcccgca | 9425 | tgcgggcgccggcggccag | 9614 |
| tggccgccggcgcccgcag | 9426 | ctgcgggcgccggcggcca | 9615 |
| ggccgccggcgcccgcagc | 9427 | gctgcgggcgccggcggcc | 9616 |
| gccgccggcgcccgcagcc | 9428 | ggctgcgggcgccggcggc | 9617 |
| ccgccggcgcccgcagccg | 9429 | cggctgcgggcgccggcgg | 9618 |
| cgccggcgcccgcagccgt | 9430 | acggctgcgggcgccggcg | 9619 |
| gccggcgcccgcagccgtc | 9431 | gacggctgcgggcgccggc | 9620 |
| ccggcgcccgcagccgtcc | 9432 | ggacggctgcgggcgccgg | 9621 |
| cggcgcccgcagccgtccg | 9433 | cggacggctgcgggcgccg | 9622 |
| ggcgcccgcagccgtccga | 9434 | tcggacggctgcgggcgcc | 9623 |
| gcgcccgcagccgtccgag | 9435 | ctcggacggctgcgggcgc | 9624 |
| cgcccgcagccgtccgaga | 9436 | tctcggacggctgcgggcg | 9625 |
| gcccgcagccgtccgagag | 9437 | ctctcggacggctgcgggc | 9626 |
| cccgcagccgtccgagagc | 9438 | gctctcggacggctgcggg | 9627 |
| ccgcagccgtccgagagcc | 9439 | ggctctcggacggctgcgg | 9628 |
| cgcagccgtccgagagccc | 9440 | gggctctcggacggctgcg | 9629 |
| gcagccgtccgagagccct | 9441 | agggctctcggacggctgc | 9630 |
| cagccgtccgagagccctg | 9442 | cagggctctcggacggctg | 9631 |
| agccgtccgagagccctgc | 9443 | gcagggctctcggacggct | 9632 |
| gccgtccgagagccctgcg | 9444 | cgcagggctctcggacggc | 9633 |
| ccgtccgagagccctgcgc | 9445 | gcgcagggctctcggacgg | 9634 |
| cgtccgagagccctgcgcc | 9446 | ggcgcagggctctcggacg | 9635 |
| gtccgagagccctgcgccc | 9447 | gggcgcagggctctcggac | 9636 |
| tccgagagccctgcgcccg | 9448 | cgggcgcagggctctcgga | 9637 |
| ccgagagccctgcgcccgc | 9449 | gcgggcgcagggctctcgg | 9638 |
| cgagagccctgcgcccgcg | 9450 | cgcgggcgcagggctctcg | 9639 |
| gagagccctgcgcccgcgc | 9451 | gcgcgggcgcagggctctc | 9640 |
| agagccctgcgcccgcgcc | 9452 | ggcgcgggcgcagggctct | 9641 |
| gagccctgcgcccgcgcct | 9453 | aggcgcgggcgcagggctc | 9642 |
| agccctgcgcccgcgcctc | 9454 | gaggcgcgggcgcagggct | 9643 |
| gccctgcgcccgcgcctcc | 9455 | ggaggcgcgggcgcagggc | 9644 |
| ccctgcgcccgcgcctccc | 9456 | gggaggcgcgggcgcaggg | 9645 |
| cctgcgcccgcgcctcccc | 9457 | ggggaggcgcgggcgcagg | 9646 |
| ctgcgcccgcgcctcccct | 9458 | aggggaggcgcgggcgcag | 9647 |
| tgcgcccgcgcctcccctt | 9459 | aaggggaggcgcgggcgca | 9648 |
| gcgcccgcgcctccccttg | 9460 | caaggggaggcgcgggcgc | 9649 |
| cgcccgcgcctccccttgc | 9461 | gcaaggggaggcgcgggcg | 9650 |
| gcccgcgcctccccttgcg | 9462 | cgcaaggggaggcgcgggc | 9651 |
| cccgcgcctccccttgcgc | 9463 | gcgcaaggggaggcgcggg | 9652 |
| ccgcgcctccccttgcgca | 9464 | tgcgcaaggggaggcgcgg | 9653 |
| cgcgcctccccttgcgcac | 9465 | gtgcgcaaggggaggcgcg | 9654 |
| gcgcctccccttgcgcacc | 9466 | ggtgcgcaaggggaggcgc | 9655 |
| cgcctccccttgcgcaccg | 9467 | cggtgcgcaaggggaggcg | 9656 |
| gcctccccttgcgcaccgt | 9468 | acggtgcgcaaggggaggc | 9657 |
| cctccccttgcgcaccgtg | 9469 | cacggtgcgcaaggggagg | 9658 |
| ctccccttgcgcaccgtgg | 9470 | ccacggtgcgcaaggggag | 9659 |
| tccccttgcgcaccgtggc | 9471 | gccacggtgcgcaagggga | 9660 |
| ccccttgcgcaccgtggca | 9472 | tgccacggtgcgcaagggg | 9661 |
| cccttgcgcaccgtggcag | 9473 | ctgccacggtgcgcaaggg | 9662 |
| ccttgcgcaccgtggcagc | 9474 | gctgccacggtgcgcaagg | 9663 |
| cttgcgcaccgtggcagcg | 9475 | cgctgccacggtgcgcaag | 9664 |
| ttgcgcaccgtggcagcgc | 9476 | gcgctgccacggtgcgcaa | 9665 |
| tgcgcaccgtggcagcgcc | 9477 | ggcgctgccacggtgcgca | 9666 |
| gcgcaccgtggcagcgccc | 9478 | gggcgctgccacggtgcgc | 9667 |
| cgcaccgtggcagcgcccg | 9479 | cgggcgctgccacggtgcg | 9668 |
| gcaccgtggcagcgcccgg | 9480 | ccgggcgctgccacggtgc | 9669 |
| caccgtggcagcgcccggc | 9481 | gccgggcgctgccacggtg | 9670 |
| accgtggcagcgcccggcg | 9482 | cgccgggcgctgccacggt | 9671 |
| ccgtggcagcgcccggcgg | 9483 | ccgccgggcgctgccacgg | 9672 |
| cgtggcagcgcccggcggg | 9484 | cccgccgggcgctgccacg | 9673 |
| gtggcagcgcccggcgggc | 9485 | gcccgccgggcgctgccac | 9674 |
| tggcagcgcccggcgggcg | 9486 | cgcccgccgggcgctgcca | 9675 |
| ggcagcgcccggcgggcgg | 9487 | ccgcccgccgggcgctgcc | 9676 |
| gcagcgcccggcgggcggt | 9488 | accgcccgccgggcgctgc | 9677 |
| cagcgcccggcgggcggtc | 9489 | gaccgcccgccgggcgctg | 9678 |
| agcgcccggcgggcggtcc | 9490 | ggaccgcccgccgggcgct | 9679 |
| gcgcccggcgggcggtcct | 9491 | aggaccgcccgccgggcgc | 9680 |
| cgcccggcgggcggtcctg | 9492 | caggaccgcccgccgggcg | 9681 |
| gcccggcgggcggtcctgc | 9493 | gcaggaccgcccgccgggc | 9682 |
| cccggcgggcggtcctgcc | 9494 | ggcaggaccgcccgccggg | 9683 |
| ccggcgggcggtcctgcca | 9495 | tggcaggaccgcccgccgg | 9684 |
| cggcgggcggtcctgccag | 9496 | ctggcaggaccgcccgccg | 9685 |
| ggcgggcggtcctgccagc | 9497 | gctggcaggaccgcccgcc | 9686 |
| gcgggcggtcctgccagcc | 9498 | ggctggcaggaccgcccgc | 9687 |
| cgggcggtcctgccagccc | 9499 | gggctggcaggaccgcccg | 9688 |
| gggcggtcctgccagcccc | 9500 | ggggctggcaggaccgccc | 9689 |
| ggcggtcctgccagccccg | 9501 | cggggctggcaggaccgcc | 9690 |
| gcggtcctgccagccccga | 9502 | tcggggctggcaggaccgc | 9691 |
| cggtcctgccagccccgac | 9503 | gtcggggctggcaggaccg | 9692 |
| ggtcctgccagccccgacg | 9504 | cgtcggggctggcaggacc | 9693 |
| gtcctgccagccccgacgg | 9505 | ccgtcggggctggcaggac | 9694 |
| tcctgccagccccgacggg | 9506 | cccgtcggggctggcagga | 9695 |
| cctgccagccccgacggga | 9507 | tcccgtcggggctggcagg | 9696 |
| ctgccagccccgacgggat | 9508 | atcccgtcggggctggcag | 9697 |
| tgccagccccgacgggatg | 9509 | catcccgtcggggctggca | 9698 |
| gccagccccgacgggatgc | 9510 | gcatcccgtcggggctggc | 9699 |
| ccagccccgacgggatgcc | 9511 | ggcatcccgtcggggctgg | 9700 |
| cagccccgacgggatgccc | 9512 | gggcatcccgtcggggctg | 9701 |
| agccccgacgggatgcccg | 9513 | cgggcatcccgtcggggct | 9702 |
| gccccgacgggatgcccgc | 9514 | gcgggcatcccgtcggggc | 9703 |
| ccccgacgggatgcccgca | 9515 | tgcgggcatcccgtcgggg | 9704 |
| cccgacgggatgcccgcag | 9516 | ctgcgggcatcccgtcggg | 9705 |
| ccgacgggatgcccgcagc | 9517 | gctgcgggcatcccgtcgg | 9706 |
| cgacgggatgcccgcagcc | 9518 | ggctgcgggcatcccgtcg | 9707 |
| gacgggatgcccgcagcca | 9519 | tggctgcgggcatcccgtc | 9708 |
| acgggatgcccgcagccat | 9520 | atggctgcgggcatcccgt | 9709 |
| cgggatgcccgcagccatg | 9521 | catggctgcgggcatcccg | 9710 |
| gggatgcccgcagccatgc | 9522 | gcatggctgcgggcatccc | 9711 |
| ggatgcccgcagccatgct | 9523 | agcatggctgcgggcatcc | 9712 |
| gatgcccgcagccatgctc | 9524 | gagcatggctgcgggcatc | 9713 |
| atgcccgcagccatgctcc | 9525 | ggagcatggctgcgggcat | 9714 |
| tgcccgcagccatgctccc | 9526 | gggagcatggctgcgggca | 9715 |
| gcccgcagccatgctcccc | 9527 | gggg | 9716 |

[0163] RNA polymerase III transcribed DNAs contain promoters, such as the U6 promoter. These DNAs can be transcribed to produce small hairpin RNAs in the cell that can function as siRNA or linear RNAs that can function as antisense RNA. The APCDD1 modulating compound can contain ribonucleotides, deoxyribonucleotides, synthetic nucleotides, or any suitable combination such that the target RNA and/or gene is inhibited. In addition, these forms of nucleic acid can be single, double, triple, or quadruple stranded. (see for example Bass (2001) Nature, 411, 428 429; Elbashir et al., (2001) Nature, 411, 494 498; and PCT Publication Nos. WO 00/44895, WO 01/36646, WO 99/32619, WO 00/01846, WO 01/29058, WO 99/07409, WO 00/44914).

[0164] An APCDD1 modulating compound can also be a small molecule that binds to APCDD1 and disrupts its function, or conversely, enhances its function. Small molecules are a diverse group of synthetic and natural substances generally having low molecular weights. They can be isolated from natural sources (for example, plants, fungi, microbes and the like), are obtained commercially and/or available as libraries or collections, or synthesized. Candidate small molecules that modulate APCDD1 can be identified via in silico screening or high-through-put (HTP) screening of combinatorial libraries. Most conventional pharmaceuticals, such as aspirin, penicillin, and many chemotherapeutics, are small molecules, can be obtained commercially, can be chemically synthesized, or can be obtained from random or combinatorial libraries as described below (Werner et al., (2006) Brief Funct. Genomic Proteomic 5(1):32-6).

[0165] Knowledge of the primary sequence of a molecule of interest, such as an APCDD1 polypeptide, and the similarity of that sequence with proteins of known function, can provide information as to the inhibitors or antagonists of the protein of interest in addition to agonists. Identification and screening of agonists and antagonists is further facilitated by determining structural features of the protein, e.g., using X-ray crystallography, neutron diffraction, nuclear magnetic resonance spectrometry, and other techniques for structure determination. These techniques provide for the rational design or identification of agonists and antagonists.

[0166] Test compounds, such as APCDD1 modulating compounds, can be screened from large libraries of synthetic or natural compounds (see Wang et al., (2007) Curr Med Chem, 14(2):133-55; Mannhold (2006) Curr Top Med Chem, 6 (10):1031-47; and Hensen (2006) Curr Med Chem 13(4):361-76). Numerous means are currently used for random and directed synthesis of saccharide, peptide, and nucleic acid based compounds. Synthetic compound libraries are commercially available from Maybridge Chemical Co. (Trevillet, Cornwall, UK), Comgenex (Princeton, N.J.), Brandon Associates (Merrimack, N.H.), and Microsource (New Milford, Conn.). A rare chemical library is available from Aldrich (Milwaukee, Wis.). Alternatively, libraries of natural compounds in the form of bacterial, fungal, plant and animal extracts are available from e.g. Pan Laboratories (Bothell, Wash.) or MycoSearch (N.C.), or are readily producible. Additionally, natural and synthetically produced libraries and compounds are readily modified through conventional chemical, physical, and biochemical means (Blondelle et al., (1996) Tib Tech 14:60).

[0167] Methods for preparing libraries of molecules are well known in the art and many libraries are commercially available. Libraries of interest in the invention include peptide libraries, randomized oligonucleotide libraries, synthetic organic combinatorial libraries, and the like. Degenerate peptide libraries can be readily prepared in solution, in immobilized form as bacterial flagella peptide display libraries or as phage display libraries. Peptide ligands can be selected from combinatorial libraries of peptides containing at least one amino acid. Libraries can be synthesized of peptoids and non-peptide synthetic moieties. Such libraries can further be synthesized which contain non-peptide synthetic moieties, which are less subject to enzymatic degradation compared to their naturally-occurring counterparts. For example, libraries can also include, but are not limited to, peptide-on-plasmid libraries, synthetic small molecule libraries, aptamer libraries, in vitro translation-based libraries, polysome libraries, synthetic peptide libraries, neurotransmitter libraries, and chemical libraries.

[0168] Examples of chemically synthesized libraries are described in Fodor et al., (1991) Science 251:767-773; Houghten et al., (1991) Nature 354:84-86; Lam et al., (1991) Nature 354:82-84; Medynski, (1994) BioTechnology 12:709-710; Gallop et al., (1994) J. Medicinal Chemistry 37(9):1233-1251; Ohlmeyer et al., (1993) Proc. Natl. Acad. Sci. USA 90:10922-10926; Erb et al., (1994) Proc. Natl. Acad. Sci. USA 91:11422-11426; Houghten et al., (1992) Biotechniques 13:412; Jayawickreme et al., (1994) Proc. Natl. Acad. Sci. USA 91:1614-1618; Salmon et al., (1993) Proc. Natl. Acad. Sci. USA 90:11708-11712; PCT Publication No. WO 93/20242, dated Oct. 14, 1993; and Brenner et al., (1992) Proc. Natl. Acad. Sci. USA 89:5381-5383.

[0169] Examples of phage display libraries are described in Scott et al., (1990) Science 249:386-390; Devlin et al., (1990) Science, 249:404-406; Christian, et al., (1992) J. Mol. Biol. 227:711-718; Lenstra, (1992) J. Immunol. Meth. 152:149-157; Kay et al., (1993) Gene 128:59-65; and PCT Publication No. WO 94/18318.

[0170] In vitro translation-based libraries include but are not limited to those described in PCT Publication No. WO 91/05058; and Mattheakis et al., (1994) Proc. Natl. Acad. Sci. USA 91:9022-9026.

[0171] As used herein, the term “ligand source” can be any compound library described herein, a library of neurotransmitters, or tissue extract prepared from various organs in an organism's system, that can be used to screen for compounds that would act as an agonist or antagonist of APCDD1. Screening compound libraries listed herein [also see U.S. Patent Application Publication No. 2005/0009163, which is hereby incorporated by reference in its entirety], in combination with in vivo animal studies, functional and signaling assays described below can be used to identify APCDD1 modulating compounds that regulate hair growth or treat hair loss disorders.

[0172] For example, functional assays for compound screening can involve axis duplication assays in xenopus embryos (Liao et al. (2006) PNAS, 103(44):1613-18; Fahnert et al., (2004) J Biol Chem, 279(46): 47520-27; Funayama, N. et al., (1995) J. Cell Biol. 128:959-968; and Moser et al., (2003) Mol Cell Biol, 23(16): 5664-79, each of which are incorporated by reference in their entireties). For example, if APCDD1 acts as an inhibitor of wnt signaling, then it should show this effect in the xenopus assay referenced above. This assay can then be used to identify APCDD1 modulating compounds, and later show that they regulate hair growth or treat hair loss disorders using mouse models

[0173] Screening the libraries can be accomplished by any variety of commonly known methods. See, for example, the following references, which disclose screening of peptide libraries: Parmley and Smith, (1989) Adv. Exp. Med. Biol. 251:215-218; Scott and Smith, (1990) Science 249:386-390; Fowlkes et al., (1992) BioTechniques 13:422-427; Oldenburg et al., (1992) Proc. Natl. Acad. Sci. USA 89:5393-5397; Yu et al., (1994) Cell 76:933-945; Staudt et al., (1988) Science 241:577-580; Bock et al., (1992) Nature 355:564-566; Tuerk et al., (1992) Proc. Natl. Acad. Sci. USA 89:6988-6992; Ellington et al., (1992) Nature 355:850-852; U.S. Pat. Nos. 5,096,815; 5,223,409; and 5,198,346, all to Ladner et al.; Rebar et al., (1993) Science 263:671-673; and PCT Pub. WO 94/18318.

[0174] Small molecule combinatorial libraries can also be generated and screened. A combinatorial library of small organic compounds is a collection of closely related analogs that differ from each other in one or more points of diversity and are synthesized by organic techniques using multi-step processes. Combinatorial libraries include a vast number of small organic compounds. One type of combinatorial library is prepared by means of parallel synthesis methods to produce a compound array. A compound array can be a collection of compounds identifiable by their spatial addresses in Cartesian coordinates and arranged such that each compound has a common molecular core and one or more variable structural diversity elements. The compounds in such a compound array are produced in parallel in separate reaction vessels, with each compound identified and tracked by its spatial address. Examples of parallel synthesis mixtures and parallel synthesis methods are provided in U.S. Ser. No. 08/177,497, filed Jan. 5, 1994 and its corresponding PCT published patent application WO95/18972, published Jul. 13, 1995 and U.S. Pat. No. 5,712,171 granted Jan. 27, 1998 and its corresponding PCT published patent application WO96/22529, which are hereby incorporated by reference.

[0175] In one non-limiting example, non-peptide libraries, such as a benzodiazepine library (see e.g., Bunin et al., (1994) Proc. Natl. Acad. Sci. USA 91:4708-4712), can be screened. Peptoid libraries, such as that described by Simon et al., (1992) Proc. Natl. Acad. Sci. USA 89:9367-9371, can also be used. Another example of a library that can be used, in which the amide functionalities in peptides have been permethylated to generate a chemically transformed combinatorial library, is described by Ostresh et al. (1994), Proc. Natl. Acad. Sci. USA 91:11138-11142.

[0176] Computer modeling and searching technologies permit the identification of compounds, or the improvement of already identified compounds, that can modulate APCDD1 expression or activity. Having identified such a compound or composition, the active sites or regions of an APCDD1 molecule can be subsequently identified via examining the sites to which the compounds bind. These sites can be ligand binding sites and can be identified using methods known in the art including, for example, from the amino acid sequences of peptides, from the nucleotide sequences of nucleic acids, or from study of complexes of the relevant compound or composition with its natural ligand. In the latter case, chemical or X-ray crystallographic methods can be used to find the active site by finding where on the factor the complexed ligand is found.

[0177] The three dimensional geometric structure of a site, for example that of an APCDD1 polypeptide, can be determined by known methods in the art, such as X-ray crystallography, which can determine a complete molecular structure. Solid or liquid phase NMR can be used to determine certain intramolecular distances. Any other experimental method of structure determination can be used to obtain partial or complete geometric structures. The geometric structures can be measured with a complexed ligand, natural or artificial, which can increase the accuracy of the active site structure determined.

[0178] Other methods for preparing or identifying peptides that bind to a target are known in the art. Molecular imprinting, for instance, can be used for the de novo construction of macromolecular structures such as peptides that bind to a molecule. See, for example, Kenneth J. Shea, Molecular Imprinting of Synthetic Network Polymers: The De Novo synthesis of Macromolecular Binding and Catalytic Sites, TRIP Vol. 2, No. 5, May 1994; Mosbach, (1994) Trends in Biochem. Sci., 19(9); and Wulff, G., in Polymeric Reagents and Catalysts (Ford, W. T., Ed.) ACS Symposium Series No. 308, pp 186-230, American Chemical Society (1986). One method for preparing mimics of an APCDD1 modulating compound involves the steps of: (i) polymerization of functional monomers around a known substrate (the template) that exhibits a desired activity; (ii) removal of the template molecule; and then (iii) polymerization of a second class of monomers in, the void left by the template, to provide a new molecule which exhibits one or more desired properties which are similar to that of the template. In addition to preparing peptides in this manner other binding molecules such as polysaccharides, nucleosides, drugs, nucleoproteins, lipoproteins, carbohydrates, glycoproteins, steroids, lipids, and other biologically active materials can also be prepared. This method is useful for designing a wide variety of biological mimics that are more stable than their natural counterparts, because they are prepared by the free radical polymerization of functional monomers, resulting in a compound with a nonbiodegradable backbone. Other methods for designing such molecules include for example drug design based on structure activity relationships, which require the synthesis and evaluation of a number of compounds and molecular modeling.

[0179] Screening Assays

[0180] APCDD1 Modulating Compounds

[0181] An APCDD1 modulating compound can be a compound that affects the activity and/or expression of an APCDD1 molecule in vivo and/or in vitro. APCDD1 modulating compounds can be agonists and antagonists of an APCDD1 molecule, and can be compounds that exert their effect on the activity of APCDD1 via the expression, via post-translational modifications, or by other means.

[0182] Test compounds or agents which bind to an APCDD1 molecule, and/or have a stimulatory or inhibitory effect on the activity or the expression of an APCDD1 molecule, can be identified by two types of assays: (a) cell-based assays which utilize cells expressing an APCDD1 molecule or a variant thereof on the cell surface; or (b) cell-free assays, which can make use of isolated APCDD1 molecules or APCDD1 mutants described herein. These assays can employ various APCDD1 molecules (e.g., a biologically active fragment of APCDD1, full-length APCDD1, a fusion protein which includes all or a portion of APCDD1, or an APCDD1 mutant previously presented—having the biochemical variations just described, i.e., a fusion protein or fragments thereof). An APCDD1 molecule can be obtained from any suitable mammalian species (e.g., human APCDD1, rat APCDD1, chick APCDD1, or murine APCDD1). The assay can be a binding assay comprising direct or indirect measurement of the binding of a test compound or a known APCDD1 ligand. The assay can also be an activity assay comprising direct or indirect measurement of the activity of an APCDD1 molecule, for example measuring the activation of downstream Wnt signaling targets such as by examining Lef/TCF transcription by way of luciferase assays. The assay can also be an expression assay comprising direct or indirect measurement of the expression of APCDD1 mRNA or protein. The various screening assays can be combined with an in vivo assay comprising measuring the effect of the test compound on the symptoms of a hair loss disorder or disease in a subject (for example, androgenetic alopecia, Alopecia greata, Alopecia greata, alopecia totalis, or alopecia universalis), loss of hair pigmentation in a subject, or even hypertrichosis.

[0183] An in vivo assay can also comprise assessing the effect of a test compound on regulating hair growth in known mammalian models that display defective or aberrant hair growth phenotypes (such as mouse models having mutations in the APCDD1 protein) or mammals that contain a mutation in the APCDD1 open reading frame (ORF) that affects hair growth regulation or hair density, or hair pigmentation (Konyukhov et al., (2004) Russian J Gen 40(7): 968-74; Peters et al., (2003) J Invest Dermatol 121(4): 674-680; Green (1974) Mouse News Lett 51:1-23). In one embodiment, controlling hair growth can comprise an induction of hair growth or density in the subject. In another embodiment, controlling hair growth can comprise promoting hair loss in a subject. Here, the compound's effect in regulating hair growth can be observed either visually via examining the organism's physical hair growth or loss, or by assessing protein or mRNA expression using methods known in the art.

[0184] Assays for screening test compounds that bind to or modulate the activity of an APCDD1 molecule can also be carried out. The test compound can be obtained by any suitable means, such as from conventional compound libraries. Determining the ability of the test compound to bind to a membrane-bound form of the APCDD1 molecule can be accomplished via coupling the test compound with a radioisotope or enzymatic label such that binding of the test compound to the APCDD1-expressing cell can be measured by detecting the labeled compound in a complex. For example, the test compound can be labeled with ³H, ¹⁴C, ³⁵S, or ¹²⁵I, either directly or indirectly, and the radioisotope can be subsequently detected by direct counting of radioemmission or by scintillation counting. Alternatively, the test compound can be enzymatically labeled with, for example, horseradish peroxidase, alkaline phosphatase, or luciferase, and the enzymatic label detected by determination of conversion of an appropriate substrate to product.

[0185] A cell-based assay can comprise contacting a cell expressing a membrane-bound form of an APCDD1 molecule (for example, a biologically active fragment of APCDD1 or a variant thereof; full-length APCDD1 or a variant thereof; or a fusion protein which includes all or a portion of APCDD1 or a variant thereof) expressed on the cell surface with a test compound and determining the ability of the test compound to modulate (such as increase or decrease) the activity of the membrane-bound form of an APCDD1 molecule. Determining the ability of the test compound to modulate the activity of the membrane-bound APCDD1 molecule can be accomplished by any method suitable for measuring the activity of a protein involved in the Wnt/β-catenin signaling pathway. The activity of such a protein can be measured in various ways, such as activation of glycogen synthase kinase 3β (GSK3β), β-catenin phosphorylation, alteration in intracellular adenomatous polyposis coli (APC) protein concentration, alteration in intracellular axin concentration, β-catenin nuclear translocation, LEF/TCF transcription, or a combination thereof. For examples of assays, see also Cignal™ TCF/LEF Reporter Assay (luc; Kit: CCS-018L; SABiosciences, Frederick, Md.); Tao et al. (2005) Cell 120(6): 857-71; Labbe et al. (2000) PNAS 97(15): 8358-63; Labbe et al., (2007) Cancer Res 67(1): 75-84; and Letamendia et al. (2001) J Bone Joint Surg 83A(1): S31-39, which are all hereby incorporated by reference in their entireties.

[0186] The ability of a test compound to modulate the activity of an APCDD1 molecule or a variant thereof can be accomplished via determining the ability of the molecule to bind to or interact with a target molecule. The target molecule can be a molecule that binds or interacts with APCDD1 or an APCDD1 mutant in nature. Non-limiting examples include: a molecule on the surface of a cell which expresses APCDD1 or a variant thereof, a molecule in the extracellular milieu, a molecule on the surface of a second cell, a cytoplasmic molecule, or a molecule associated with the internal surface of a cell membrane. The target molecule can be a component of a signal transduction pathway which transduces an extracellular signal.

[0187] The cell-free assays of the present invention entail use of either a membrane-bound form of an APCDD1 molecule or an APCDD1 mutant described herein, or a soluble fragment thereof. In the case of cell-free assays comprising the membrane-bound form of the polypeptide, a solubilizing agent can be used in order for the membrane-bound form of the polypeptide to be maintained in solution. Examples of such solubilizing agents include but are not limited to non-ionic detergents such as Triton X-100, Triton X-114, n-octylglucoside, Isotridecypoly(ethylene glycol ether)n, 3-[(3-cholamidopropyl)dimethylamminio]-1-propane sulfonate (CHAPS), 3-[(3-cholamidopropyl)dimethylamminio]-2-hydroxy-1-propane sulfonate (CHAPSO), n-dodecylglucoside, n-dodecylmaltoside, octanoyl-N-methylglucamide, decanoyl-N-methylglucamide, Thesit, or N-dodecyl=N,N-dimethyl-3-ammonio-1-propane sulfonate.

[0188] An APCDD1 molecule or an APCDD1-target molecule can be immobilized to facilitate the separation of complexed from uncomplexed forms of one or both of the proteins. Binding of a test compound to an APCDD1 molecule or a variant thereof, or interaction of APCDD1 with a target molecule in the presence and absence of a test compound, can be accomplished in any vessel suitable for containing the reactants. Examples of such vessels include microtiter plates, test tubes, and micro-centrifuge tubes. In one embodiment, a fusion protein can be provided which adds a domain that allows one or both of the proteins to be bound to a matrix (for example, glutathione-S-transferase (GST) fusion proteins or glutathione-S-transferase fusion proteins can be adsorbed onto glutathione sepharose beads (Sigma Chemical; St. Louis, Mo.) or glutathione derivatized microtiter plates).

[0189] An APCDD1 molecule, or a variant thereof, can also be immobilized via being bound to a solid support. Non-limiting examples of suitable solid supports include glass or plastic slides, tissue culture plates, microtiter wells, tubes, silicon chips, or particles such as beads (including, but not limited to, latex, polystyrene, or glass beads). Any method known in the art can be used to attach a polypeptide (or polynucleotide) corresponding to APCDD1 or a variant thereof, or test compound to a solid support, including use of covalent and non-covalent linkages, or passive absorption.

[0190] The diagnostic assay of the screening methods of the invention can also involve monitoring the expression of an APCDD1 molecule. For example, regulators of the expression of an APCDD1 molecule can be identified via contacting a cell with a test compound and determining the expression of APCDD1 protein or APCDD1 mRNA in the cell. The protein or mRNA expression level of APCDD1 in the presence of the test compound is compared to the protein or mRNA expression level of APCDD1 in the absence of the test compound. The test compound can then be identified as a regulator of APCDD1 expression based on this comparison. For example, when expression of APCDD1 protein or mRNA is statistically or significantly greater in the presence of the test compound than in its absence, the test compound is identified as a stimulator/enhancer of expression of APCDD1 protein or mRNA. In other words, the test compound can be said to be an APCDD1 modulating compound (such as an agonist). Alternatively, when expression of APCDD1 protein or mRNA is statistically or significantly less in the presence of the test compound than in its absence, the compound is identified as an inhibitor of the expression of APCDD1 protein or mRNA. In other words, the test compound can also be said to be an APCDD1 modulating compound (such as an antagonist). The expression level of APCDD1 protein or mRNA in cells can be determined by methods previously described.

[0191] For binding assays, the test compound can be a small molecule which binds to and occupies the binding site of an APCDD1 polypeptide, or a variant thereof. This can make the ligand binding site inaccessible to substrate such that normal biological activity is prevented. Examples of such small molecules include, but are not limited to, small peptides or peptide-like molecules. In binding assays, either the test compound or the APCDD1 polypeptide can comprise a detectable label, such as a fluorescent, radioisotopic, chemiluminescent, or enzymatic label (for example, alkaline phosphatase, horseradish peroxidase, or luciferase). Detection of a test compound which is bound to a polypeptide of APCDD1 or an APCDD1 mutant described herein can then be determined via direct counting of radioemmission, by scintillation counting, or by determining conversion of an appropriate substrate to a detectable product.

[0192] Determining the ability of a test compound to bind to an APCDD1 molecule or a variant thereof, such as an APCDD1 mutant described herein, also can be accomplished using real-time Biamolecular Interaction Analysis (BIA) [McConnell, (1992); Sjolander, (1991)]. BIA is a technology for studying biospecific interactions in real time, without labeling any of the interactants (for example, BIA-core™). Changes in the optical phenomenon surface plasmon resonance (SPR) can be used as an indication of real-time reactions between biological molecules.

[0193] To identify other proteins which bind to or interact with an APCDD1 molecule and modulate its activity, an APCDD1 polypeptide can be used as a bait protein in a two-hybrid assay or three-hybrid assay (Szabo, (1995); U.S. Pat. No. 5,283,317), according to methods practiced in the art. The two-hybrid system is based on the modular nature of most transcription factors, which consist of separable DNA-binding and activation domains.

[0194] Functional Assays

[0195] Test compounds can be tested for the ability to increase or decrease the activity of an APCDD1 molecule, or a variant thereof. Activity can be measured after contacting a purified APCDD1 molecule, a cell membrane preparation, or an intact cell with a test compound. A test compound that decreases the activity of an APCDD1 molecule by at least about 10%, at least about 20%, at least about 30%, at least about 40%, at least about 50%, at least about 60%, at least about 70%, at least about 75%, at least about 80%, at least about 90%, at least about 95% or 100% is identified as a potential agent for decreasing the activity of an APCDD1 molecule, for example an antagonist. A test compound that increases the activity of an APCDD1 molecule by at least about 10%, at least about 20%, at least about 30%, at least about 40%, at least about 50%, at least about 60%, at least about 70%, at least about 75%, at least about 80%, at least about 90%, at least about 95% or 100% is identified as a potential agent for increasing the activity of an APCDD1 molecule, for example an agonist.

[0196] Diagnosis

[0197] The invention provides diagnosis methods based on monitoring the APCDD1 gene in a subject. As used herein, the term “diagnosis” includes the detection, typing, monitoring, dosing, comparison, at various stages, including early, pre-symptomatic stages, and late stages, in adults and children. Diagnosis can include the assessment of a predisposition or risk of development, the prognosis, or the characterization of a subject to define most appropriate treatment (pharmacogenetics).

[0198] The invention provides diagnostic methods to determine whether an individual is at risk of developing a hair-loss disorder, or suffers from a hair-loss disorder, wherein the disease results from an alteration in the expression of the APCDD1 gene. In one embodiment, a method of detecting the presence of or a predisposition to a hair-loss disorder in a subject is provided. The subject can be a human or a child thereof. The method can comprise detecting in a sample from the subject the presence of an alteration in the expression of the APCDD1 gene in said sample. In one embodiment, the detecting comprises detecting whether there is an alteration in the APCDD1 gene locus, while in a further embodiment the detecting comprises detecting whether a small nuclear polymorphism (SNP) is present in the APCDD1 gene locus. The SNP can comprise a single nucleotide change, or a cluster of SNPs in and around the APCDD1 gene, or other SNPS that are in linkage disequilibrium (LD) with APCDD1 and could be used as sentinel SNPS for the APCDD1 haplotype. In another embodiment, the detecting comprises detecting whether at least a portion of the APCDD1 gene is deleted. In a further embodiment, the detecting comprises detecting whether expression of APCDD1 is reduced. In some embodiments, the detecting comprises detecting in the sample whether there is a reduction in APCDD1 mRNA, APCDD1 protein, or a combination thereof. The presence of such an alteration is indicative of the presence or predisposition to a hair-loss disorder. Non-limiting examples of hair-loss disorders include androgenetic alopecia, Alopecia greata, Alopecia greata, alopecia totalis, or alopecia universalis.

[0199] The presence of an alteration in the APCDD1 gene in the sample is detected through the genotyping of a sample, for example via gene sequencing, selective hybridization, amplification, gene expression analysis, or a combination thereof. In one embodiment, the sample can comprise blood, serum, sputum, lacrimal secretions, semen, vaginal secretions, fetal tissue, skin tissue, epithelial tissue, muscle tissue, amniotic fluid, or a combination thereof. In another embodiment, a reduction in APCDD1 expression of at least 20% indicates a predisposition or presence of a hair-loss disorder in the subject.

[0200] The invention also provides a method for treating or preventing a hair-loss disorder in a subject. In one embodiment, the method comprises detecting the presence of an alteration in the APCDD1 gene in a sample from the subject, the presence of the alteration being indicative of a hair-loss disorder, or the predisposition to a hair-loss disorder, and, administering to the subject in need a therapeutic treatment against a hair-loss disorder. The therapeutic treatment can be a drug administration (for example, a pharmaceutical composition comprising a functional APCDD1 molecule). In one embodiment, the molecule comprises a APCDD1 polypeptide comprising at least about 75%, at least about 80%, at least about 85%, at least about 90%, at least about 93%, at least about 95%, at least about 97%, at least about 98%, at least about 99%, or 100% of the amino acid sequence of SEQ ID NO: 1, and exhibits the function of restoring functional APCDD1 expression in deficient individuals, thus restoring the capacity to initiate hair growth in epithelial cells derived from hair follicles or skin. In another embodiment, the molecule comprises a nucleic acid encoding a APCDD1 polypeptide comprising at least about 75%, at least about 80%, at least about 85%, at least about 90%, at least about 93%, at least about 95%, at least about 97%, at least about 98%, at least about 99%, or 100% of the nucleic acid sequence of SEQ ID NO: 2 and encodes a polypeptide with the function of restoring functional APCDD1 expression in deficient individuals, thus restoring the capacity to initiate hair growth in epithelial cells derived from hair follicles or skin.

[0201] The alteration can be determined at the level of the APCDD1 DNA, RNA, or polypeptide. Optionally, detection can be determined by performing an oligonucleotide ligation assay, a confirmation based assay, a hybridization assay, a sequencing assay, an allele-specific amplification assay, a microsequencing assay, a melting curve analysis, a denaturing high performance liquid chromatography (DHPLC) assay (for example, see Jones et al, (2000) Hum Genet., 106(6):663-8), or a combination thereof. In another embodiment, the detection is performed by sequencing all or part of the APCDD1 gene or by selective hybridization or amplification of all or part of the APCDD1 gene. An APCDD1 gene specific amplification can be carried out before the alteration identification step.

[0202] An alteration in the APCDD1 gene locus can be any form of mutation(s), deletion(s), rearrangement(s) and/or insertions in the coding and/or non-coding region of the locus, alone or in various combination(s). Mutations can include point mutations. Insertions can encompass the addition of one or several residues in a coding or non-coding portion of the gene locus. Insertions can comprise an addition of between 1 and 50 base pairs in the gene locus. Deletions can encompass any region of one, two or more residues in a coding or non-coding portion of the gene locus, such as from two residues up to the entire gene or locus. Deletions can affect smaller regions, such as domains (introns) or repeated sequences or fragments of less than about 50 consecutive base pairs, although larger deletions can occur as well. Rearrangement includes inversion of sequences. The APCDD1 gene locus alteration can result in amino acid substitutions, RNA splicing or processing, product instability, the creation of stop codons, frame-shift mutations, and/or truncated polypeptide production. The alteration can result in the production of an APCDD1 polypeptide with altered function, stability, targeting or structure. The alteration can also cause a reduction in protein expression. In one embodiment, the alteration in the APCDD1 gene locus can comprise a point mutation, a deletion, or an insertion in the APCDD1 gene or corresponding expression product. In another embodiment, the alteration can be a deletion or partial deletion of the APCDD1 gene. The alteration can be determined at the level of the APCDD1 DNA, RNA, or polypeptide.

[0203] In another embodiment, the method can comprise detecting the presence of altered APCDD1 RNA expression. Altered RNA expression includes the presence of an altered RNA sequence, the presence of an altered RNA splicing or processing, or the presence of an altered quantity of RNA. These can be detected by various techniques known in the art, including sequencing all or part of the APCDD1 RNA or by selective hybridization or selective amplification of all or part of the RNA. In a further embodiment, the method can comprise detecting the presence of an altered APCDD1 polypeptide expression. Altered APCDD1 polypeptide expression includes the presence of an altered polypeptide sequence, the presence of an altered quantity of APCDD1 polypeptide, or the presence of an altered tissue distribution. These can be detected by various techniques known in the art, including by sequencing and/or binding to specific ligands (such as antibodies).

[0204] Various techniques known in the art can be used to detect or quantify altered APCDD1 gene or RNA expression or APCDD1 nucleic acid sequence, which include, but are not limited to, hybridization, sequencing, amplification, and/or binding to specific ligands (such as antibodies). Other suitable methods include allele-specific oligonucleotide (ASO), oligonucleotide ligation, allele-specific amplification, Southern blot (for DNAs), Northern blot (for RNAs), single-stranded conformation analysis (SSCA), PFGE, fluorescent in situ hybridization (FISH), gel migration, clamped denaturing gel electrophoresis, denaturing HLPC, melting curve analysis, heteroduplex analysis, RNase protection, chemical or enzymatic mismatch cleavage, ELISA, radio-immunoassays (RIA) and immuno-enzymatic assays (IEMA). Some of these approaches (such as SSCA and CGGE) are based on a change in electrophoretic mobility of the nucleic acids, as a result of the presence of an altered sequence. According to these techniques, the altered sequence is visualized by a shift in mobility on gels. The fragments can then be sequenced to confirm the alteration. Some other approaches are based on specific hybridization between nucleic acids from the subject and a probe specific for wild type or altered APCDD1 gene or RNA. The probe can be in suspension or immobilized on a substrate. The probe can be labeled to facilitate detection of hybrids. Some of these approaches are suited for assessing a polypeptide sequence or expression level, such as Northern blot, ELISA and RIA. These latter require the use of a ligand specific for the polypeptide, for example, the use of a specific antibody.

[0205] Sequencing

[0206] Sequencing can be carried out using techniques well known in the art, using automatic sequencers. The sequencing can be performed on the complete APCDD1 gene or on specific domains thereof, such as those known or suspected to carry deleterious mutations or other alterations.

[0207] Amplification

[0208] Amplification is based on the formation of specific hybrids between complementary nucleic acid sequences that serve to initiate nucleic acid reproduction. Amplification can be performed according to various techniques known in the art, such as by polymerase chain reaction (PCR), ligase chain reaction (LCR), strand displacement amplification (SDA) and nucleic acid sequence based amplification (NASBA). These techniques can be performed using commercially available reagents and protocols. Useful techniques in the art encompass real-time PCR, allele-specific PCR, or PCR-SSCP. Amplification usually requires the use of specific nucleic acid primers, to initiate the reaction. Nucleic acid primers useful for amplifying sequences from the APCDD1 gene or locus are able to specifically hybridize with a portion of the APCDD1 gene locus that flank a target region of the locus, wherein the target region is altered in certain subjects having a hair-loss disorder. In one embodiment, amplification can comprise using forward and reverse RT-PCR primers comprising nucleotide sequences of SEQ ID NOS: 57 and 103, respectively (See Table 4).

[0209] The invention provides for a nucleic acid primer, wherein the primer can be complementary to and hybridize specifically to a portion of a APCDD1 coding sequence (e.g., gene or RNA) altered in certain subjects having a hair-loss disorder. Primers of the invention can be specific for altered sequences in a APCDD1 gene or RNA. By using such primers, the detection of an amplification product indicates the presence of an alteration in the APCDD1 gene or the absence of such gene. Primers can also be used to identify small nuclear polymorphisms (SNPs) locted in or around the APCDD1 gene locus; SNPs can comprise a single nucleotide change, or a cluster of SNPs in and around the APCDD1 gene, or other SNPS that are in linkage disequilibrium (LD) with APCDD1 and could be used as sentinel SNPS for the APCDD1 haplotype. Examples of primers of this invention can be single-stranded nucleic acid molecules of about 5 to 60 nucleotides in length, or about 8 to about 25 nucleotides in length. The sequence can be derived directly from the sequence of the APCDD1 gene. Perfect complementarity is useful to ensure high specificity; however, certain mismatch can be tolerated.

For example, a nucleic acid primer or a pair of nucleic acid primers as described above can be used in a method for detecting the presence of or a predisposition to a hair-loss disorder in a subject.

[0210] Amplification methods include, e.g., polymerase chain reaction, PCR (PCR PROTOCOLS, A GUIDE TO METHODS AND APPLICATIONS, ed. Innis, Academic Press, N.Y., 1990 and PCR STRATEGIES, 1995, ed. Innis, Academic Press, Inc., N.Y., ligase chain reaction (LCR) (see, e.g., Wu, Genomics 4:560, 1989; Landegren, Science 241:1077, 1988; Barringer, Gene 89:117, 1990); transcription amplification (see, e.g., Kwoh, Proc. Natl. Acad. Sci. USA 86:1173, 1989); and, self-sustained sequence replication (see, e.g., Guatelli, Proc. Natl. Acad. Sci. USA 87:1874, 1990); Q Beta replicase amplification (see, e.g., Smith, J. Clin. Microbiol. 35:1477-1491, 1997), automated Q-beta replicase amplification assay (see, e.g., Burg, Mol. Cell. Probes 10:257-271, 1996) and other RNA polymerase mediated techniques (e.g., NASBA, Cangene, Mississauga, Ontario); see also Berger, Methods Enzymol. 152:307-316, 1987; Sambrook; Ausubel; U.S. Pat. Nos. 4,683,195 and 4,683,202; Sooknanan, Biotechnology 13:563-564, 1995. All the references stated above are incorporated by reference in their entireties.

[0211] Selective Hybridization

[0212] Hybridization detection methods are based on the formation of specific hybrids between complementary nucleic acid sequences that serve to detect nucleic acid sequence alteration(s). A detection technique involves the use of a nucleic acid probe specific for wild type or altered APCDD1 gene or RNA, followed by the detection of the presence of a hybrid. The probe can be in suspension or immobilized on a substrate or support (for example, as in nucleic acid array or chips technologies). The probe can be labeled to facilitate detection of hybrids. In one embodiment, the probe according to the invention can comprise a nucleic acid sequence having SEQ ID NOS: 63 or 109. For example, a sample from the subject can be contacted with a nucleic acid probe specific for a wild type APCDD1 gene or an altered APCDD1 gene, and the formation of a hybrid can be subsequently assessed. In one embodiment, the method comprises contacting simultaneously the sample with a set of probes that are specific, respectively, for the wild type APCDD1 gene and for various altered forms thereof. Thus, it is possible to detect directly the presence of various forms of alterations in the APCDD1 gene in the sample. Also, various samples from various subjects can be treated in parallel.

[0213] According to the invention, a probe can be a polynucleotide sequence which is complementary to and capable of specific hybridization with a (target portion of a) APCDD1 gene or RNA, and that is suitable for detecting polynucleotide polymorphisms associated with APCDD1 alleles which predispose to or are associated with a hair-loss disorder. Useful probes are those that are complementary to the APCDD1 gene, RNA, or target portion thereof. Probes can comprise single-stranded nucleic acids of between 8 to 1000 nucleotides in length, for instance between 10 and 800, between 15 and 700, or between 20 and 500. Longer probes can be used as well. A useful probe of the invention is a single stranded nucleic acid molecule of between 8 to 500 nucleotides in length, which can specifically hybridize to a region of a APCDD1 gene or RNA that carries an alteration.

[0214] The sequence of the probes can be derived from the sequences of the APCDD1 gene and RNA as provided herein. Nucleotide substitutions can be performed, as well as chemical modifications of the probe. Such chemical modifications can be accomplished to increase the stability of hybrids (e.g., intercalating groups) or to label the probe. Some examples of labels include, without limitation, radioactivity, fluorescence, luminescence, and enzymatic labeling.

[0215] A guide to the hybridization of nucleic acids is found in e.g., Sambrook, ed., MOLECULAR CLONING: A LABORATORY MANUAL (2^{ND} ED.), Vols. 1-3, Cold Spring Harbor Laboratory, 1989; CURRENT PROTOCOLS IN MOLECULAR BIOLOGY, Ausubel, ed. John Wiley & Sons, Inc., New York, 1997; LABORATORY TECHNIQUES IN BIOCHEMISTRY AND MOLECULAR BIOLOGY: HYBRIDIZATION WITH NUCLEIC ACID PROBES, PART I. Theory and Nucleic Acid Preparation, Tijssen, ed. Elsevier, N.Y., 1993.

[0216] Specific Ligand Binding

[0217] As indicated above, alteration in the APCDD1 gene locus or APCDD1 expression can also be detected by screening for alteration(s) in APCDD1 polypeptide sequence or expression levels. Different types of ligands can be used, such as specific antibodies. In one embodiment, the sample is contacted with an antibody specific for an APCDD1 polypeptide and the formation of an immune complex is subsequently determined. Various methods for detecting an immune complex can be used, such as ELISA, radioimmunoassays (RIA) and immuno-enzymatic assays (IEMA).

[0218] For example, an antibody can be a polyclonal antibody, a monoclonal antibody, as well as fragments or derivatives thereof having substantially the same antigen specificity. Fragments include Fab, Fab′2, or CDR regions. Derivatives include single-chain antibodies, humanized antibodies, or poly-functional antibodies. An antibody specific for an APCDD1 polypeptide, can be an antibody that selectively binds an APCDD1 polypeptide, namely, an antibody raised against an APCDD1 polypeptide or an epitope-containing fragment thereof. Although non-specific binding towards other antigens can occur, binding to the target APCDD1 polypeptide occurs with a higher affinity and can be reliably discriminated from non-specific binding. In one embodiment, the method can comprise contacting a sample from the subject with an antibody specific for a wild type or an altered form of a APCDD1 polypeptide, and determining the presence of an immune complex. Optionally, the sample can be contacted to a support coated with antibody specific for the wild type or altered form of an APCDD1 polypeptide. In one embodiment, the sample can be contacted simultaneously, or in parallel, or sequentially, with various antibodies specific for different forms of an APCDD1 polypeptide, such as a wild type and various altered forms thereof.

[0219] The invention also provides for a diagnostic kit comprising products and reagents for detecting in a sample from a subject the presence of an alteration in the APCDD1 gene or polypeptide, in the APCDD1 gene or polypeptide expression, and/or in APCDD1 activity. The kit can be useful for determining whether a sample from a subject exhibits reduced APCDD1 expression or exhibits an APCDD1 gene deletion. For example, the diagnostic kit according to the present invention comprises any primer, any pair of primers, any nucleic acid probe and/or any ligand, (for example, a APCDD1 antibody), described in the present invention. The diagnostic kit according to the present invention can further comprise reagents and/or protocols for performing a hybridization, amplification or antigen-antibody immune reaction. In one embodiment, the kit can comprise nucleic acid primers that specifically hybridize to and can prime a polymerase reaction from APCDD1. In another embodiment, the primer can comprise a nucleotide sequence of SEQ ID NO: 19, 21-25, 63, 65, 67-71, or 109.

[0220] The diagnosis methods can be performed in vitro, ex vivo, or in vivo, using a sample from the subject, to assess the status of the APCDD1 gene locus. The sample can be any biological sample derived from a subject, which contains nucleic acids or polypeptides. Examples of such samples include, but are not limited to, fluids, tissues, cell samples, organs, or tissue biopsies. Non-limiting examples of samples include blood, plasma, saliva, urine, or seminal fluid. Pre-natal diagnosis can also be performed by testing fetal cells or placental cells, for instance. Screening of parental samples can also be used to determine risk/likelihood of offspring possessing the germline mutation. The sample can be collected according to conventional techniques and used directly for diagnosis or stored. The sample can be treated prior to performing the method, in order to render or improve availability of nucleic acids or polypeptides for testing. Treatments include, for instance, lysis (e.g., mechanical, physical, or chemical), centrifugation. Also, the nucleic acids and/or polypeptides can be pre-purified or enriched by conventional techniques, and/or reduced in complexity. Nucleic acids and polypeptides can also be treated with enzymes or other chemical or physical treatments to produce fragments thereof. In one embodiment, the sample is contacted with reagents such as probes, primers or ligands in order to assess the presence of an altered APCDD1 gene locus. Contacting can be performed in any suitable device, such as a plate, tube, well, or glass. In specific embodiments, the contacting is performed on a substrate coated with the reagent, such as a nucleic acid array or a specific ligand array. The substrate can be a solid or semi-solid substrate such as any support comprising glass, plastic, nylon, paper, metal, or polymers. The substrate can be of various forms and sizes, such as a slide, a membrane, a bead, a column, or a gel. The contacting can be made under any condition suitable for a complex to be formed between the reagent and the nucleic acids or polypeptides of the sample.

[0221] Identifying an altered APCDD1 polypeptide, RNA, or DNA in the sample is indicative of the presence of an altered APCDD1 gene in the subject, which can be correlated to the presence, predisposition or stage of progression of a hair-loss disorder. For example, an individual having a germ line APCDD1 mutation has an increased risk of developing a hair-loss disorder. The determination of the presence of an altered APCDD1 gene locus in a subject also allows the design of appropriate therapeutic intervention, which is more effective and customized. Also, this determination at the pre-symptomatic level allows a preventive regimen to be applied.

[0222] Gene Therapy and Protein Replacement Methods

[0223] Delivery of nucleic acids into viable cells can be effected ex vivo, in situ, or in vivo by use of vectors, such as viral vectors (e.g., lentivirus, adenovirus, adeno-associated virus, or a retrovirus), or ex vivo by use of physical DNA transfer methods (e.g., liposomes or chemical treatments). Non-limiting techniques suitable for the transfer of nucleic acid into mammalian cells in vitro include the use of liposomes, electroporation, microinjection, cell fusion, DEAE-dextran, and the calcium phosphate precipitation method (See, for example, Anderson, Nature, supplement to vol. 392, no. 6679, pp. 25-20 (1998)). Introduction of a nucleic acid or a gene encoding a polypeptide of the invention can also be accomplished with extrachromosomal substrates (transient expression) or artificial chromosomes (stable expression). Cells can also be cultured ex vivo in the presence of therapeutic compositions of the present invention in order to proliferate or to produce a desired effect on or activity in such cells. Treated cells can then be introduced in vivo for therapeutic purposes.

[0224] Nucleic acids can be inserted into vectors and used as gene therapy vectors. A number of viruses have been used as gene transfer vectors, including papovaviruses, e.g., SV40 (Madzak et al., 1992), adenovirus (Berkner, 1992; Berkner et al., 1988; Gorziglia and Kapikian, 1992; Quantin et al., 1992; Rosenfeld et al., 1992; Wilkinson et al., 1992; Stratford-Perricaudet et al., 1990), vaccinia virus (Moss, 1992), adeno-associated virus (Muzyczka, 1992; Ohi et al., 1990), herpesviruses including HSV and EBV (Margolskee, 1992; Johnson et al., 1992; Fink et al., 1992; Breakfield and Geller, 1987; Freese et al., 1990), and retroviruses of avian (Biandyopadhyay and Temin, 1984; Petropoulos et al., 1992), murine (Miller, 1992; Miller et al., 1985; Sorge et al., 1984; Mann and Baltimore, 1985; Miller et al., 1988), and human origin (Shimada et al., 1991; Helseth et al., 1990; Page et al., 1990; Buchschacher and Panganiban, 1992). Non-limiting examples of in vivo gene transfer techniques include transfection with viral (typically retroviral) vectors (see U.S. Pat. No. 5,252,479, which is incorporated by reference in its entirety) and viral coat protein-liposome mediated transfection (Dzau et al., Trends in Biotechnology 11:205-210 (1993), incorporated entirely by reference). For example, naked DNA vaccines are generally known in the art; see Brower, Nature Biotechnology, 16:1304-1305 (1998), which is incorporated by reference in its entirety. Gene therapy vectors can be delivered to a subject by, for example, intravenous injection, local administration (see, e.g., U.S. Pat. No. 5,328,470) or by stereotactic injection (see, e.g., Chen, et al., 1994. Proc. Natl. Acad. Sci. USA 91: 3054-3057). The pharmaceutical preparation of the gene therapy vector can include the gene therapy vector in an acceptable diluent, or can comprise a slow release matrix in which the gene delivery vehicle is imbedded. Alternatively, where the complete gene delivery vector can be produced intact from recombinant cells, e.g., retroviral vectors, the pharmaceutical preparation can include one or more cells that produce the gene delivery system.

[0225] For reviews of gene therapy protocols and methods see Anderson et al., Science 256:808-813 (1992); U.S. Pat. Nos. 5,252,479, 5,747,469, 6,017,524, 6,143,290, 6,410,010 6,511,847; and U.S. Application Publication Nos. 2002/0077313 and 2002/00069, which are all hereby incorporated by reference in their entireties. For additional reviews of gene therapy technology, see Friedmann, Science, 244:1275-1281 (1989); Verma, Scientific American: 68-84 (1990); Miller, Nature, 357: 455-460 (1992); Kikuchi et al., J Dermatol Sci. 2008 May; 50(2):87-98; Isaka et al., Expert Opin Drug Deliv. 2007 September; 4(5):561-71; Jager et al., Curr Gene Ther. 2007 August; 7(4):272-83; Waehler et al., Nat Rev Genet. 2007 August; 8(8):573-87; Jensen et al., Ann Med. 2007; 39(2):108-15; Herweijer et al., Gene Ther. 2007 January; 14(2):99-107; Eliyahu et al., Molecules, 2005 Jan. 31; 10(1):34-64; and Altaras et al., Adv Biochem Eng Biotechnol. 2005; 99:193-260, all of which are hereby incorporated by reference in their entireties.

[0226] Protein replacement therapy can increase the amount of protein by exogenously introducing wild-type or biologically functional protein by way of infusion. A replacement polypeptide can be synthesized according to known chemical techniques or can be produced and purified via known molecular biological techniques. Protein replacement therapy has been developed for various disorders. For example, a wild-type protein can be purified from a recombinant cellular expression system (e.g., mammalian cells or insect cells—see U.S. Pat. No. 5,580,757 to Desnick et al.; U.S. Pat. Nos. 6,395,884 and 6,458,574 to Selden et al.; U.S. Pat. No. 6,461,609 to Calhoun et al.; U.S. Pat. No. 6,210,666 to Miyamura et al.; U.S. Pat. No. 6,083,725 to Selden et al.; U.S. Pat. No. 6,451,600 to Rasmussen et al.; U.S. Pat. No. 5,236,838 to Rasmussen et al. and U.S. Pat. No. 5,879,680 to Ginns et al.), human placenta, or animal milk (see U.S. Pat. No. 6,188,045 to Reuser et al.), or other sources known in the art. After the infusion, the exogenous protein can be taken up by tissues through non-specific or receptor-mediated mechanism.

[0227] An APCDD1 polypeptide can also be delivered in a controlled release system. For example, the polypeptide can be administered using intravenous infusion, an implantable osmotic pump, a transdermal patch, liposomes, or other modes of administration. In one embodiment, a pump can be used (see is Langer, supra; Sefton, CRC Crit. Ref. Biomed. Eng. 14:201 (1987); Buchwald et al., Surgery 88:507 (1980); Saudek et al., N. Engl. J. Med. 321:574 (1989)). In another embodiment, polymeric materials can be used (see Medical Applications of Controlled Release, Langer and Wise (eds.), CRC Pres., Boca Raton, Fla. (1974); Controlled Drug Bioavailability, Drug Product Design and Performance, Smolen and Ball (eds.), Wiley, New York (1984); Ranger and Peppas, J. Macromol. Sci. Rev. Macromol. Chem. 23:61 (1983); see also Levy et al., Science 228:190 (1985); During et al., Ann. Neurol. 25:351 (1989); Howard et al., J. Neurosurg. 71:105 (1989)). In yet another embodiment, a controlled release system can be placed in proximity of the therapeutic target thus requiring only a fraction of the systemic dose (see, e.g., Goodson, in Medical Applications of Controlled Release, supra, vol. 2, pp. 115-138 (1984)). Other controlled release systems are discussed in the review by Langer (Science 249:1527-1533 (1990)).

[0228] Pharmaceutical Compositions and Administration for Therapy

[0229] APCDD1 molecules and APCDD1 modulating compounds of the invention can be incorporated into pharmaceutical compositions suitable for administration. Such compositions can comprise an APCDD1 molecule or an APCDD1 modulating compound and a pharmaceutically acceptable carrier.

[0230] According to the invention, a pharmaceutically acceptable carrier can comprise any and all solvents, dispersion media, coatings, antibacterial and antifungal agents, isotonic and absorption delaying agents, and the like, compatible with pharmaceutical administration. The use of such media and agents for pharmaceutically active substances is well known in the art. Any conventional media or agent that is compatible with the active compound can be used. Supplementary active compounds can also be incorporated into the compositions.

[0231] The invention also provides for a kit that comprises a pharmaceutically acceptable carrier and an APCDD1 modulating compound identified using the screening assays of the invention packaged with instructions for use. For modulators that are antagonists of the activity of an APCDD1 molecule, or which reduce the expression of an APCDD1 molecule, the instructions would specify use of the pharmaceutical composition for promoting the loss of hair on the body surface of a mammal (for example, the arms, legs, bikini area, face, and the like).

[0232] For APCDD1 modulating compounds that are agonists of the activity of an APCDD1 molecule or increase the expression of an APCDD1, the instructions would specify use of the pharmaceutical composition for regulating hair growth. In one embodiment, the instructions would specify use of the pharmaceutical composition for the treatment of hair loss disorders. In another embodiment, the instructions would specify use of the pharmaceutical composition for promoting hair growth in a subject. In a further embodiment, the instructions would specify use of the pharmaceutical composition for restoring hair pigmentation. For example, administering an APCDD1 agonist can reduce hair graying in a subject.

[0233] Any of the therapeutic applications described herein can be applied to any subject in need of such therapy, including, for example, a mammal such as a dog, a cat, a cow, a horse, a rabbit, a monkey, a pig, a sheep, a goat, or a human.

[0234] A pharmaceutical composition containing an APCDD1 modulating compound can be administered in conjunction with a pharmaceutically acceptable carrier, for any of the therapeutic effects discussed herein. Such pharmaceutical compositions can comprise, for example antibodies directed to human APCDD1 or a variant thereof, APCDD1 agonists, APCDD1 antagonists, or APCDD1 inhibitors. The compositions can be administered alone or in combination with at least one other agent, such as a stabilizing compound, which can be administered in any sterile, biocompatible pharmaceutical carrier including, but not limited to, saline, buffered saline, dextrose, and water. The compositions can be administered to a patient alone, or in combination with other agents, drugs or hormones.

[0235] A pharmaceutical composition of the invention is formulated to be compatible with its intended route of administration. Examples of routes of administration include parenteral, e.g., intravenous, intradermal, subcutaneous, oral (e.g., inhalation), transdermal (topical), transmucosal, and rectal administration. Solutions or suspensions used for parenteral, intradermal, or subcutaneous application can include the following components: a sterile diluent such as water for injection, saline solution, fixed oils, polyethylene glycols, glycerine, propylene glycol or other synthetic solvents; antibacterial agents such as benzyl alcohol or methyl parabens; antioxidants such as ascorbic acid or sodium bisulfite; chelating agents such as ethylenediaminetetraacetic acid; buffers such as acetates, citrates or phosphates and agents for the adjustment of tonicity such as sodium chloride or dextrose. pH can be adjusted with acids or bases, such as hydrochloric acid or sodium hydroxide. The parenteral preparation can be enclosed in ampoules, disposable syringes or multiple dose vials made of glass or plastic.

[0236] Pharmaceutical compositions suitable for injectable use include sterile aqueous solutions (where water soluble) or dispersions and sterile powders for the extemporaneous preparation of sterile injectable solutions or dispersions. For intravenous administration, suitable carriers include physiological saline, bacteriostatic water, Cremophor EM™ (BASF, Parsippany, N.J.) or phosphate buffered saline (PBS). In all cases, the composition must be sterile and should be fluid to the extent that easy syringability exists. It must be stable under the conditions of manufacture and storage and must be preserved against the contaminating action of microorganisms such as bacteria and fungi. The carrier can be a solvent or dispersion medium containing, for example, water, ethanol, a pharmaceutically acceptable polyol like glycerol, propylene glycol, liquid polyetheylene glycol, and suitable mixtures thereof. The proper fluidity can be maintained, for example, by the use of a coating such as lecithin, by the maintenance of the required particle size in the case of dispersion and by the use of surfactants. Prevention of the action of microorganisms can be achieved by various antibacterial and antifungal agents, for example, parabens, chlorobutanol, phenol, ascorbic acid, thimerosal, and the like. In many cases, it can be useful to include isotonic agents, for example, sugars, polyalcohols such as mannitol, sorbitol, sodium chloride in the composition. Prolonged absorption of the injectable compositions can be brought about by including in the composition an agent which delays absorption, for example, aluminum monostearate and gelatin.

[0237] Sterile injectable solutions can be prepared by incorporating the APCDD1 modulating compound (e.g., a polypeptide or antibody) in the required amount in an appropriate solvent with one or a combination of ingredients enumerated herein, as required, followed by filtered sterilization. Generally, dispersions are prepared by incorporating the active compound into a sterile vehicle which contains a basic dispersion medium and the required other ingredients from those enumerated herein. In the case of sterile powders for the preparation of sterile injectable solutions, examples of useful preparation methods are vacuum drying and freeze-drying which yields a powder of the active ingredient plus any additional desired ingredient from a previously sterile-filtered solution thereof.

[0238] Oral compositions generally include an inert diluent or an edible carrier. They can be enclosed in gelatin capsules or compressed into tablets. For the purpose of oral therapeutic administration, the active compound can be incorporated with excipients and used in the form of tablets, troches, or capsules. Oral compositions can also be prepared using a fluid carrier for use as a mouthwash, wherein the compound in the fluid carrier is applied orally and swished and expectorated or swallowed.

[0239] Pharmaceutically compatible binding agents, and/or adjuvant materials can be included as part of the composition. The tablets, pills, capsules, troches and the like can contain any of the following ingredients, or compounds of a similar nature: a binder such as microcrystalline cellulose, gum tragacanth or gelatin; an excipient such as starch or lactose, a disintegrating agent such as alginic acid, Primogel, or corn starch; a lubricant such as magnesium stearate or sterotes; a glidant such as colloidal silicon dioxide; a sweetening agent such as sucrose or saccharin; or a flavoring agent such as peppermint, methyl salicylate, or orange flavoring.

[0240] Systemic administration can also be by transmucosal or transdermal means. For transmucosal or transdermal administration, penetrants appropriate to the barrier to be permeated are used in the formulation. Such penetrants are generally known in the art, and include, for example, for transmucosal administration, detergents, bile salts, and fusidic acid derivatives. Transmucosal administration can be accomplished through the use of nasal sprays or suppositories. For transdermal administration, the active compounds are formulated into ointments, salves, gels, or creams as generally known in the art

[0241] In some embodiments, the APCDD1 modulating compound can be applied via transdermal delivery systems, which slowly releases the active compound for percutaneous absorption. Permeation enhancers can be used to facilitate transdermal penetration of the active factors in the conditioned media. Transdermal patches are described in for example, U.S. Pat. No. 5,407,713; U.S. Pat. No. 5,352,456; U.S. Pat. No. 5,332,213; U.S. Pat. No. 5,336,168; U.S. Pat. No. 5,290,561; U.S. Pat. No. 5,254,346; U.S. Pat. No. 5,164,189; U.S. Pat. No. 5,163,899; U.S. Pat. No. 5,088,977; U.S. Pat. No. 5,087,240; U.S. Pat. No. 5,008,110; and U.S. Pat. No. 4,921,475.

[0242] Various routes of administration and various sites of cell implantation can be utilized, such as, subcutaneous or intramuscular, in order to introduce the aggregated population of cells into a site of preference. Once implanted in a subject (such as a mouse, rat, or human), the aggregated cells can then stimulate the formation of a hair follicle and the subsequent growth of a hair structure at the site of introduction. In another embodiment, transfected cells (for example, cells expressing APCDD1) are implanted in a subject to promote the formation of hair follicles within the subject. In further embodiments, the transfected cells are cells derived from the end bulb of a hair follicle (such as dermal papilla cells or dermal sheath cells).

[0243] Aggregated cells (for example, cells grown in a hanging drop culture) or transfected cells (for example, cells produced as described herein) maintained for 1 or more passages can be introduced (or implanted) into a subject (such as a rat, mouse, dog, cat, human, and the like).

[0244] “Subcutaneous” administration can refer to administration just beneath the skin (i.e., beneath the dermis). Generally, the subcutaneous tissue is a layer of fat and connective tissue that houses larger blood vessels and nerves. The size of this layer varies throughout the body and from person to person. The interface between the subcutaneous and muscle layers can be encompassed by subcutaneous administration.

[0245] This mode of administration can be feasible where the subcutaneous layer is sufficiently thin so that the factors present in the compositions can migrate or diffuse from the locus of administration and contact the hair follicle cells responsible for hair formation. Thus, where intradermal administration is utilized, the bolus of composition administered is localized proximate to the subcutaneous layer.

[0246] Administration of the cell aggregates (such as DP or DS aggregates) is not restricted to a single route, but can encompass administration by multiple routes. For instance, exemplary administrations by multiple routes include, among others, a combination of intradermal and intramuscular administration, or intradermal and subcutaneous administration. Multiple administrations can be sequential or concurrent. Other modes of application by multiple routes will be apparent to the skilled artisan.

[0247] In other embodiments, this implantation method will be a one-time treatment for some subjects. In further embodiments of the invention, multiple cell therapy implantations will be required. In some embodiments, the cells used for implantation will generally be subject-specific genetically engineered cells. In another embodiment, cells obtained from a different species or another individual of the same species can be used. Thus, using such cells can require administering an immunosuppressant to prevent rejection of the implanted cells. Such methods have also been described in United States Patent Application Publication 2004/0057937 and PCT application publication WO 2001/32840, and are hereby incorporated by reference.

### EXAMPLES

[0248] Examples are provided below to facilitate a more complete understanding of the invention. The following examples illustrate the exemplary modes of making and practicing the invention. However, the scope of the invention is not limited to specific embodiments disclosed in these Examples, which are for purposes of illustration only, since alternative methods can be utilized to obtain similar results.

### Example 1

### Mutations in the Hypotrichin/APCDD1 Gene, a Target of wnt Signaling, Underlie Hereditary Hypotrichosis Simplex

[0249] Very few forms of hereditary hair loss exist that bear similarities to common hair loss such as androgenetic alopecia. Hereditary hypotrichosis simplex (HHS; OMIM 146520/605389) is one such form of hair loss that has been infrequently described in the literature^{1,2}.

[0250] To identify a gene involved in HHS, we performed genetic linkage analysis in two families of Pakistani origin with autosomal dominant HHS, characterized by progressive loss and thinning of scalp and body hairs. We identified a region of linkage on chromosome 18p11.22 in both families. Fine mapping of critical recombination events delineated a region of 1.8 Mb, containing 8 known genes, 4 pseudogenes and 3 predicted transcripts. One of the known genes, APCDD1, encodes a predicted secreted protein with no known function. Resequencing of APCDD1 revealed an identical heterozygous pathogenic mutation in the signal sequence of the protein (L9R) in both families. We confirmed the role of APCDD1 in HHS by sequencing the gene in a third family from Italy that had previously been linked to the same region of chromosome 18p³, and unexpectedly identified the identical mutation. Haplotype analysis revealed that the mutation had arisen independently in each of the three families, suggesting that this nucleotide is a hotspot for mutations in HHS. APCDD1 is intensely expressed in the dermal papilla, the matrix, and the hair shaft of human hair follicles. Expression of mutant APCDD1 demonstrates that the mutation L9R dramatically prevents the translational processing, which leads to significant reduction of the expression and secretion of APCDD1. Our findings indicate that disruption of APCDD1 underlies HHS, and uncover a gene with a critical role in human hair growth.

[0251] The hair follicle (HF) is a complex organ which periodically regenerates in the form of a hair cycle. Recent advances in molecular genetics have enabled the identification of numerous genes that are expressed in the HF⁴. Disruption of some of these genes underlies different types of hereditary hypotrichosis. Although most of them are associated with other cutaneous and/or systemic abnormalities, isolated forms of hereditary hypotrichosis also exist. Of these, Marie Unna hypotrichosis (OMIM 146550) is an autosomal dominant disorder characterized by coarse, wiry and twisted hair shaft, and has been reported to show linkage to chromosome 8p22-p21⁵, though no gene has yet been identified. In addition, monilethrix is characterized by a specific hair shaft anomaly called moniliform hair. This disease can show either autosomal dominant (OMIM 158000) or recessive (OMIM 252200) inheritance trait, and several causative genes have been identified to date⁶⁻⁸.

[0252] A rare form of hereditary hypotrichosis without any characteristic hair shaft anomalies is known as hereditary hypotrichosis simplex (HHS; OMIM 146520/605389)^{1,2}. Affected individuals with HHS typically show normal hair at birth, but hair loss and thinning of the hair shaft on the scalp start during early childhood and progress with age, frequently affecting the body hairs as well. Histologically, HHS is characterized by progressive HF miniaturization, which is a pathognomonic feature to androgenetic alopecia^{1,9}. In most cases, HHS shows an autosomal dominant inheritance pattern (ADHHS)^{1-3, 10}, but recessive HHS (ARHHS) is also known¹¹. We undertook this study to discover the genetic basis of HHS.

[0253] Results

[0254] We first identified two Pakistani families, HHS1 and HHS2, with features consistent with HHS. Pedigrees of both families were consistent with autosomal dominant inheritance, and each family had multiple affected individuals. All affected individuals had normal scalp hair density at birth, and the hair loss gradually progressed with age, beginning around 2-5 years old (FIGS. 1A-F, FIG. 5). The hair grows slowly and stops growing after a few inches. Some affected individuals show light-colored or hypopigmented hair shafts (FIGS. 1A and 1C, FIG. 5A). In most cases, body hairs and sexual hairs are also sparse (FIG. 5F). Eyebrows, eyelashes, and beard hairs are not affected. Under light microscopy, the bulb portion of the plucked hair is miniaturized and shows dystrophic features (FIG. 5G). The hair shaft is thin and without any characteristic anomalies (FIG. 5H), and the distal ends appear tapered (FIG. 5I). Affected individuals in both families show normal teeth, nails, and sweating, and do not show keratosis pilaris. There was no familial history of either neurologic abnormalities or a high prevalence of cancers.

[0255] We used commercially available low density human mapping arrays (Affymetrix 10K) to genotype 16 and 12 members of each family, respectively. Parametric linkage analysis was performed on inferred haplotypes under a dominant model. A maximum LOD score of z=4.6 was obtained for a haplotype on chromosome 18p11.22. The −2LOD interval spanned from 7.4 Mb to 25 Mb (FIG. 1G). This interval was then saturated with microsatellite markers to confirm linkage and more clearly define the region (FIG. 1H, FIG. 6). Critical recombination events were detected between markers RAB31-MS and D18S1153 in the affected individual III-1 of HHS1 (FIG. 1H), as well as between markers D18S1116 and GNAS-MS in the affected individual III-4 of HHS1 (FIG. 1H), which allowed the interval of linkage to be narrowed to 1.8 Mb flanked by markers RAB31-MS and GNAL-MS.

[0256] The critical region contained 8 known genes, 4 pseudogenes and 3 unknown predicted transcripts (FIG. 2A). We performed direct sequencing analysis of all known genes in the region, and identified a mutation in APCDD1 (adenomatosis polyposis coli down-regulated 1) gene¹² in both families. All affected individuals in both families carry the identical heterozygous missense mutation consisting of a T- to -G transversion at position 26 in exon 1 (26T>G), resulting in the substitution from Leucine to Arginine at codon 9, designated L9R (FIG. 2B). This nucleotide change is not reported in any of the public databases. Screening assays with the restriction enzyme DdeI show that the mutation L9R cosegregates with the disease phenotype in both families, and 100 unrelated unaffected control individuals of Pakistani origin do not carry the mutation (FIG. 2A, FIG. 6).

[0257] To replicate the causal role of APCDD1 in HHS, we analyzed an Italian family with autosomal dominant HHS (FIG. 7A). This family displays similar clinical features with the Pakistani families (FIG. 7B-E), and was previously reported to show linkage to a 9.8 Mb interval on chromosome 18p11.32-p11.23, in which the APCDD1 gene resides (FIG. 7F)³. Unexpectedly, direct sequencing analysis demonstrated that affected individuals in this family carry the identical heterozygous mutation 26T>G (L9R) in the APCDD1 gene (FIG. 7G). The mutation links with the disease phenotype and was excluded from 100 unrelated unaffected northern European control individuals. Haplotype analysis using microsatellite markers around and within the APCDD1 gene demonstrates that all three families show a different disease-related haplotype (FIG. 8), suggesting that the mutation arose independently in each family. Although the mutation does not exist in a CpG dinucleotide, our results strongly suggest that the nucleotide at position 26 of the APCDD1 gene is a mutational hotspot.

[0258] The APCDD1 gene was initially discovered in a screen for genes associated with colon cancer, and was found to be downregulated by the tumor suppressor APC¹². The amino-acid sequence of APCDD1 protein does not have any known homology domains to aid in predicting its function. In addition, there are no known family members, other than APCDD1-like gene (APCDD1L). The APCDD1 protein is 58 KDa in size and predicted to consist of the N-terminal signal peptide, followed by the large extracellular domain, the C-terminal transmembrane domain and the cytoplasmic domain (FIG. 3A). Within the extracellular domain, there is a potential N-glycosylation site at amino acid position 168. APCDD1 is highly conserved in vertebrate evolution, with homologs being present as distantly as sea squirt (FIG. 9)¹⁴. The mutation found in all three families is identical (L9R), resides in the signal peptide (FIG. 3A), and Leu9 is conserved from bat to human (FIG. 3B). The analysis of the signal peptide sequences with the SignalP-HMM program (version 3.0) shows that Leu9 is located within the hydrophobic core of the signal peptide that is critical for the cotranslational processing of the protein¹⁵. The substitution by a hydrophilic amino acid arginine is predicted to severely affect the composition of the hydrophobic core (FIGS. 10A and 10B). To test this, we transfected expression constructs of C-terminal HA-tagged wild-type and two different mutant APCDD1 into human embryonic kidney (HEK) 293 cells, and analyzed their expression patterns by western blotting with an anti-HA antibody. Three fragments around 52 KDa, 65 KDa, and 130 KDa were detected in total cell lysate of the wild-type APCDD1 construct-transfected cells (FIG. 3C; lane 1, top panel). The 65 KDa fragment was clearly digested with PNGase F, suggesting that wild-type APCDD1 is modified with N-Glycosylation (FIG. 11A).

[0259] To examine the 130 KDa fragment, we overexpressed both HA-tagged and c-myc-tagged APCDD1 in HEK293T cells, and performed immunoprecipitation using an anti-c-myc antibody, which was followed by western blot with an anti-HA antibody. The result demonstrated that HA-tagged APCDD1 was co-precipitated with c-myc-tagged APCDD1, which strongly suggests dimerization of the APCDD1 protein (FIG. 11B). A mutant APCDD1 with a conservative amino acid substitution (L9V) showed a similar expression pattern to the wild type protein (FIG. 3C; lane 3, top panel). By contrast, only a faint fragment, 52 KDa in size, was detected in total cell lysate of the L9R mutant construct-transfected cells (FIG. 3C; lane 2, top panel). In addition, a 65 KDa fragment was detected in the medium of the wild-type and the control L9V mutant APCDD1 construct-transfected cells, while no fragment in the medium of the L9R mutant construct-transfected cells (FIG. 3C; lanes 1-3, bottom panel). Furthermore, when equal amounts of the wild-type and the L9R mutant constructs are co-transfected, the expression level of the wild-type APCDD1 is markedly decreased (FIG. 3C; lane 6).

[0260] To analyze the localization of APCDD1 protein in cells, we performed immunocytostainings using the anti-HA antibody and a commercially available mouse polyclonal anti-APCDD1 antibody (from Abnova). At lower cell density, the wild-type APCDD1 is detected in the cytoplasm, as well as at the cell membrane (FIGS. 3D and 3E). Interestingly, at higher cell density, its expression is more clearly defined to the cell membrane (FIG. 3F). By contrast, the mutant L9R APCDD1 is only weakly expressed around the nucleus (FIG. 3G), suggesting that the mutant protein is retained in the endoplasmic reticulum. These results show that APCDD1 is a secreted protein which localizes at the cell membrane, and the mutation L9R in the signal peptide severely disrupts the cotranslational processing of the protein from the mutant allele. Furthermore, when equal amounts of the wild-type and the L9R mutant constructs are co-transfected, the expression level of the wild-type APCDD1 is markedly decreased (FIG. 12), suggesting that the L9R mutant APCDD1 also prevents the expression of the wild-type protein in HEK293T cells.

[0261] The expression pattern of Apcdd1 (also known as drapc1) in mouse was reported and shows strong expression in the dermal papilla (DP), as well as the matrix region of the adult mouse HFs¹⁴. Consistent with these data, human APCDD1-mRNA was detected in plucked HFs and DP cells by RT-PCR (FIGS. 4A and 4B). DP cells play a crucial role in dermal-epidermal interactions which produce HF, and cultured DP cells on later passages lose their capacity for HF induction¹⁶. Therefore, it is significant to look for genes that are differentially expressed in fresh DP cells. Interestingly, the expression level of the APCDD1 mRNA markedly decreases in cultured DP cells as compared with fresh DP cells (FIG. 4B, FIG. 13). By contrast, the expression of the APCDD1L (see SEQ ID NO: 110), a homologue of APCDD1, is only weakly detected in cultured DP cells, but not in fresh DP cells (FIG. 4B).

[0262] These results suggest that the APCDD1 gene could be a key for HF induction. Western blot with the anti-APCDD1 antibody showed two fragments, around 56 KDa and 130 KDa in size, in cell lysate from human scalp skin, which is likely to correspond to a monomer and a dimer of the APCDD1 protein, respectively (FIG. 14). To further implicate APCDD1 in the pathogenesis of HHS, we examined its expression in the human HFs by in situ hybridization and immunofluorescence analysis with the anti-APCDD1 antibody. These studies demonstrate that human APCDD1 is strongly expressed in the DP, the matrix region, the hair shaft, and weakly in the inner root sheath of the HFs (FIGS. 4C-I). In upper portion of the HFs, it is also expressed in the outer root sheath, as well as the sebaceous gland (FIG. 4J). Despite the widespread expression of APCDD1 in many other body sites including heart, pancreas, prostate, and colon¹², we found no evidence of other phenotypes in any affected family members from the three families. The only phenotype observed in affected individuals with the APCDD1 mutation is hypotrichosis. Therefore, we propose a new nomenclature of the APCDD1 gene as “hypotrichin”.

[0263] The polypeptide sequence of human APCDD1L is depicted in SEQ ID NO: 110. The nucleotide sequence of human APCDD1L is shown in SEQ ID NO: 111. Sequence information related to APCDD1L is accessible in public databases by GenBank Accession number NM_{—}153360.1.

[0264] SEQ ID NO: 110 is the human wild type amino acid sequence corresponding to APCDD1L (residues 1-501):

MPAAMLPYACVLVLLGAHTAPAAGEAGGSCLRWEPHCQQPLPDRVPSTAI
LPPRLNGPWISTGCEVRPGPEFLTRAYTFYPSRLFRAHQFYYEDPFCGEP
AHSLLVKGKVRLRRASWVTRGATEADYHLHKVGIVFHSRRALVDVTGRLN
QTRAGRDCARRLPPARAWLPGALYELRSARAQGDCLEALGLTMHELSLVR
VQRRLQPQPRASPRLVEELYLGDIHTDPAERRHYRPTGYQRPLQSALHHV
QPCPACGLIARSDVHHPPVLPPPLALPLHLGGWWVSSGCEVRPAVLFLTR
LFTFHGHSRSWEGYYHHFSDPACRQPTFTVYAAGRYTRGTPSTRVRGGTE
LVFEVTRAHVTPMDQVTTAMLNFSEPSSCGGAGAWSMGTERDVTATNGCL
PLGIRLPHVEYELFKMEQDPLGQSLLFIGQRPTDGSSPDTPEKRPTSYQA
PLVLCHGEAPDFSRPPQHRPSLQKHPSTGGLHIAPFPLLPLVLGLAFLHW
L

[0265] SEQ ID NO: 111 is the human wild type nucleotide sequence corresponding to APCDD1L (nucleotides 1-3112), wherein the underscored ATG denotes the beginning of the open reading frame:

acaactatcaacagccgggaaggctgagcgcgtgtgagcgccgagggggg
cgcaggaccctcgcaacttcttcgcaggactccagcctggccgccggcgc
ccgcagccgtccgagagccctgcgcccgcgcctccccttgcgcaccgtgg
cagcgcccggcgggcggtcctgccagccccgacgggatgcccgcagccat
gctcccctacgcttgcgtcctggtgcttttgggagcccacactgcaccgg
cggctggggaggccgggggcagctgcctgcgctgggaaccccactgccag
cagcccttgccagatagagtgcccagcactgcgatcctgcctccacgcct
taatggaccttggatctccacaggctgcgaggtgcgcccaggaccggagt
tcctgacccgcgcctacaccttctaccccagccggctctttcgagcccac
cagttctactacgaggaccccttctgcggggaacctgcccactcgctgct
cgtcaagggcaaagtccgcctgcgccgggcctcctgggtcacccggggag
ccaccgaggccgactaccacctgcacaaggtgggcatcgtcttccacagc
cgccgggccctggtcgacgtcaccgggcgcctcaaccagacccgcgccgg
ccgggactgcgcgcggcggctgcctccggcccgggcctggctgcctgggg
cgctgtacgagctgcggagcgcccgggctcagggggactgcctggaggcg
ctgggcctcaccatgcacgagctcagcctggtccgcgtgcagcgccgcct
gcagccgcagccccgggcgtcgccccggctggtggaggagctgtacctgg
gggacatccacaccgacccggcggagaggcggcactaccggcccacgggc
taccagcgcccgctgcagagcgcactgcaccacgtgcagccgtgcccagc
ctgtggcctcattgcccgctccgatgtgcaccacccgcccgtgctgccgc
cccctctggccctgcccctgcacctgggcggctggtgggtcagctcgggg
tgcgaggtgcgcccagcagtcctgttcctcacccggctcttcactttcca
cgggcacagccgctcctgggaagggtattaccaccacttctcagacccag
cctgccggcagcccaccttcaccgtgtatgccgccggccgctacaccagg
ggcacgccatccaccagggtccgcggcggcaccgagctggtgtttgaggt
cacacgggcccatgtgacccccatggaccaggtcaccacggccatgctca
acttctctgagccaagcagctgtgggggtgcgggggcctggtccatgggc
actgagcgggatgtcacagccaccaacggctgcctaccgctgggcatccg
gctcccgcatgtggagtacgagcttttcaagatggaacaagaccccctcg
ggcaaagcctgctcttcatcggacaaaggcccaccgatggctcaagtccc
gataccccagagaaacgtcccacctcctaccaagcacccctggtgctctg
tcatggggaggcccccgacttctccaggccaccgcagcacaggccatcgc
tgcagaagcaccccagcacagggggtcttcacatagcccccttcccactt
ctgcccctagttctagggctggccttcctccactggctatgacattggac
ttgacatcaggatggcggctctggacacccattcaacccttcagactccc
tcctggcagctgtagggaaggaaccattctcctctgctctgtcatggatg
gatgcacagccccactgcttccaaactctgcctgtgtcccatgtggctca
ggacatgagcttaacccctgcaaagcctataccacatcccacagcccggg
tccccagtcaagcacttggatgcggcagtgatgttcatcgctacgtgagt
ttctaaagatcactcccaatttttctactttcctcatccttggcagctcg
ccaacaggttcagtcagggggccacacggaacacccccatcccatgttcc
ccccagttcttcccatcctgacccttgggattccaagatgggagcaagag
gagatcctgaggctctgcctagggacgaggcctacagttctgccatgtct
gtaggttgttgtttaaagattattaattcgaatttagcaatacgatctct
aagtggtgccatgaattaaagatgccacttcgggctttcagtgcttctca
gcttttgggcaaagggcttgtgtcttcaggggcagctcagctttcctgag
tcctgactgctggcactcgtctgcatttgcctgtgcttctgcgagtcgga
cctcaagctgccaacactgcatgtggataaatccagttttcccgggccag
catgcaaaatgaagaggactccatctaagctgagaagcatggcctcccca
gagcagcctgcggcctccaagccttcctggcccaggcaaatgccagtgtg
caccaggctggctgctgggggcaggtctttggaggggagcagcatttcca
gccttctgaacatagttaatagtaatgacagccgtaacactaacgcgctc
tgcaattcgccctgcccagccatcctcggttgccaagattgcctgtgcct
gcctgacaaaggaagagaatctccgaatgtgtatctttgggcccacccta
gggagaggtcggggtcaccaggctacatggcgacatctaggcagctccgc
cttgcccagcctccttgccataatcctaatatattggtgtcctctgctca
gaggggactgtcatcatggtgggaacaggctgtgcctccccagggactct
gcccatgttcccagggcctcatctgtacactgtgaaattaactggcatcc
tggtgggcccaagggttttcaggactgggggccaatgactcaccccctcc
ttcctcctcctgatccctatctctagctcttatcacagattttgaacaat
tgtctgtgaggttaatgatggtttcagagggaagcccttttcctccctga
gactgtgtggggttcagtcagcctgctgaaattgcttccacttattaccc
atccttcctctt

[0266] In this study, we demonstrated that APCDD1 is a glycoprotein which is secreted outside of the cells (FIG. 3C, FIG. 11A). Overexpression of APCDD1 in colon cancer cells led to enhanced proliferation¹⁶. Our results further suggest a possibility that the secreted APCDD1 could bind to a certain receptor and promote cell growth in vivo. The downstream signaling and developmental pathway affected by APCDD1 remain to be determined.

[0267] The mutation L9R identified in this study is located in the signal peptide of APCDD1 protein. Substitution of a leucine residue in the signal peptide has been reported to be pathogenic in several other autosomal dominant diseases, such as familial hypocalciuric hypercalcemia (OMIM 145980)¹⁵ and antithrombin III deficiency (OMIM 107300)¹⁷. In most of these cases, mutations affected the cotranslational processing of the mutant protein^{16, 17}. Consistent with these data, the mutation L9R in APCDD1 results in a marked reduction of the expression and secretion of the mutant protein (FIG. 3C), suggesting that the mutation severely disrupts the structure and the function of the signal peptide of APCDD1. Furthermore, we have observed that the mutant protein, which is retained in ER, also blocks the processing of the wild-type protein in HEK293T cells (FIG. 3C). In addition, the mutant protein markedly represses the expression of wild-type APCDD1 in HEK293T cells (FIG. 12). Although it remains unknown whether the same phenomenon occurs in HFs, our results suggest the possibility that the expression level of APCDD1 in HFs in affected individuals with the mutation L9R can be less than 50% as compared with that in unaffected individuals. Alternatively, since several cases with 18p deletion showed some phenotypes in HFs (FIGS. 2C and 2D)^{13, 18-21}, haploinsufficiency of APCDD1 gene can be enough to affect HF development and hair growth in humans. Since APCDD1 is expressed in many critical organs¹², homozygosity for either the mutation L9R or a complete knockout APCDD1 allele could be lethal.

[0268] APCDD1 has previously been shown to be a direct target gene of WNT/β-catenin signaling, based on the evidence that β-catenin/TCF4 complexes directly binds to the APCDD1 promoter and activates its expression¹². Consistent with this data, loss of APCDD1 expression has been reported to be downregulated in Wilms tumor with inactivating mutations in the β-catenin gene²². The involvement of APCDD1 in the development of normal tissues has also been suggested, as the APCDD1 is abundantly expressed in several developing tissues, such as limb buds in mice, as well as carapacial ridge in turtles^{15, 23}. The WNT/β-catenin signaling is known to play crucial roles in HF morphogenesis and development^{24,25}. Our expression studies show that APCDD1 is expressed in the matrix, the hair shaft, and the dermal papilla cells of the human HFs, where β-catenin and the transcription factor LEF1 are abundantly expressed²⁶. It is known that the DP cells secrete a variety of proteins, such as HGF, IGF1, KGF, and α-MSA, which support proliferation and differentiation of the surrounding matrix cells and the hair follicle melanocytes²⁵. In addition to these known proteins, APCDD1 is a key regulator for hair growth which is secreted from the DP cells in vivo.

[0269] Chromosome 18p has also been implicated in the genetic etiology of two multifactorial hair diseases. Genome-wide linkage studies for Alopecia Areata²⁷ (AA) and Androgenetic Alopecia²⁸ (AGA) have suggested the presence of disease loci on chromosome 18p. AA is one of the most common causes of hair loss in humans with a lifetime risk of nearly 2%. We performed the first genome-wide linkage study performed for AA and identified several potential loci, including one located on chromosome 18p11.31²⁷. Fine-mapping was performed for this study identified significant linkage (maxLOD=3.93) at 18p11.23 and defined a −2LOD interval that spanned from 3.4 Mb to 12.9 Mb and includes the APCDD1 locus. AGA, also known as male/female pattern baldness, is another highly prevalent complex disease that causes hair loss in humans. A recent genome-wide linkage study identified several loci, one of which is located on chromosome 18 μp11-q23 (max NPL score=2.56), in a region containing APCDD1²⁸. Diminished function of the DP cells is known to play a critical role in miniaturization of the HF typical of AGA²⁹, which is also observed in affected individuals with the APCDD1 mutation. In this study, we have shown that APCDD1 is a secreted protein abundantly expressed in the DP cells in vivo, and whose expression is lost upon explant culture, when the HF inductive properties of the DP also decline. Targeting APCDD1 could represent a new therapeutic modality not only for HHS, but potentially also for more common forms of hair loss.

[0270] Methods

[0271] Clinical details and DNA extraction. Informed consent was obtained from all subjects and approval for this study was provided by the Institutional Review Board of Columbia University and. The study was conducted in adherence to the Declaration of Helsinki Principles. Peripheral blood samples were collected from the family members as well as unrelated healthy control individuals of Pakistani and European origin (100 individuals each). Genomic DNA was isolated from these samples according to standard techniques.

[0272] Linkage Analysis. Genome-wide genotyping was performed with the Affymetrix Human Mapping 10K 2.0 Array. Quality control and data analysis was performed with Genespring GT (Agilent software). Briefly, SNPs that violated Mendelian inheritance pattern were removed from the data set prior to analysis. Haplotypes were inferred from raw genotype data. By analyzing haplotypes rather than individual SNPs, Type I error introduced by linkage disequilibrium between markers is mitigated. Finally, haplotypes were analyzed for linkage under the assumption of a fully penetrant disease gene with a frequency of 0.001 transmitted by a dominant mode of inheritance.

[0273] Mutation Analysis. Using the genomic DNA of the family members, all exons and exon-intron boundaries of APCDD1 gene were amplified by PCR with the gene-specific primers (Table 4). The PCR products were directly sequenced in an ABI Prism 310 Automated Sequencer, using the ABI Prism Big Dye Terminator Cycle Sequencing Ready Reaction Kit (PE Applied Biosystems). The mutation 26T>G disrupts a DdeI restriction enzyme site, which was used to screen the family members and control individuals.

TABLE 4
Primers used in the Study

| | | | | | | | |
|---|---|---|---|---|---|---|---|
| | | | | | | Anneal- | |
| | | | | | | ing | prod- |
| | | | Seq | | Seq | temper- | uct |
| primer | | | ID | | ID | ature | size |
| name | position (bp) | forward primer (5′ to 3′) | NO | reverse primer (5′ to 3′) | NO | (C.°) | (bp) |

Primers to amplify additional microsatellite markers

| | | | | | | | |
|---|---|---|---|---|---|---|---|
| RAB31-MS | 9,847,609-9,847,756 | GCAAATGAATACACTAACTAGCCA | 18 | CACCAGGCCTAGGCTAAAATG | 64 | 55 | 148 |
| APCDD1- | 10,454,280-10,454,403 | CCAGTGAGACCTTAAAAGCTTCA | 19 | TTGCTATACTTTAGGAGCCAGAA | 65 | 55 | 124 |
| MS | | | | | | | |
| GNAL-MS | 11,693,739-11,693,854 | GGCTTGGGTACAATAATGAGCT | 20 | CAGAGCTTCCTGCACTTCAC | 66 | 55 | 116 |

Primers to amplify candidate genes from genomic DNA

| | | | | | | |
|---|---|---|---|---|---|---|
| APCDD1 | CGACGCGCCCTTTCAAGTCT | 21 | CGCCAAGGGGACAGTGTAG | 67 | 61 | 668 |
| ex1 | | | | | | |
| APCDD1 | CACTGTCTGCTGCAGAGGT | 22 | GGTCTTCCATAGTGGTGTGC | 68 | 56 | 328 |
| ex2 | | | | | | |
| APCDD1 | GAATCTCTTTCCCATACCTTCAG | 23 | TGGCAAGCCTTTAAGAAGGATC | 69 | 56 | 659 |
| ex3 | | | | | | |
| APCDD1 | CGGAAGCATGTGTGCACTG | 24 | AAGAGGTCCTTTCCCTCAGC | 70 | 56 | 481 |
| ex4 | | | | | | |
| APCDD1 | GTCTAGTTAGAGTGTGGCCAG | 25 | TTCTCTGGCATTCAAGTGCATC | 71 | 56 | 651 |
| ex5 | | | | | | |
| RAB31 | CAAAGCAGGAGTGTTGAAGCA | 26 | TGTGCTCACTCTTCTCAAAGTG | 72 | 55 | 302 |
| ex6 | | | | | | |
| TXNDC2 | GAGGGAAAACCAACTGTAACGT | 27 | CTACAACTTTCCCTTCTTGGTTC | 73 | 55 | 323 |
| ex1 | | | | | | |
| TXNDC2 | CAGACTTCATTCGTGATCTCGA | 28 | TACAAGCAGTGCCATTTGGACAT | 74 | 59 | 1,802 |
| ex2 | | | | | | |
| VAPA ex1 | AGCCTGGCCTCGTCCTAGA | 29 | AAAGCAGCCGGGAAAGGGAA | 75 | 55 | 335 |
| VAPA ex2 | GAAAGGCAGTGTTAGTAGCCAT | 30 | TATTTCCCTCCCTCCAGATG | 76 | 55 | 339 |
| VAPA ex3 | GTTTAAGGCAAATCCCAGACTT | 31 | ACTGCTAAACAACACCCACAGT | 77 | 55 | 275 |
| VAPA ex4 | GTCCCGTGAGGTGAAACTTA | 32 | GGAACTGAGAGCTCAACAGC | 78 | 55 | 203 |
| VAPA ex5 | CAGTCATTCCCAATATCATGCAG | 33 | CACAATACCACTTATCTGCTAGG | 79 | 55 | 299 |
| VAPA ex6 | ATCTGACTGCTGACATGTACTG | 34 | TGGCCTAATAACACTCACATGTC | 80 | 55 | 383 |
| VAPA ex7 | CACTAATCTACTTTCCGTCCCTA | 35 | CGTGGGCCATACTACCAATG | 81 | 55 | 350 |
| NAPG ex1 | TGTCGCGCTGCACCAGCTT | 36 | GGAGTGTGACCCAGAGGAC | 82 | 55 | 337 |
| NAPG ex2 | GACCTAGAAGGTCATTACAAGC | 37 | GCCTTATAGAAAGCATATGAGTAAGT | 83 | 55 | 249 |
| NAPG ex3 | CTGATTTGTTGCCAGTAGTCAAC | 38 | GCGAACCAGTGTGGACCTTA | 84 | 55 | 527 |
| NAPG ex4 | TGGAACCAACTGGGTCAGTG | 39 | TTACAGTTAGGAGTAAGTCTTGGT | 85 | 55 | 306 |
| NAPG ex5 | TATGTTGTGCATGAGCCCATTG | 40 | CTTGCCTTACAGTAAGGAAGCT | 86 | 55 | 261 |
| NAPG | CTGCACATGTGTCCCAGAAC | 41 | TGGTGTGTCTACAGCTTATACC | 87 | 55 | 869 |
| ex6-8 | | | | | | |
| NAPG ex9 | AAGTACATTTCACAGGGGACCT | 42 | AAGCTGTAGTGGGCTTACTCTA | 88 | 55 | 318 |
| NAPG | TCCCGTGGAAGTTACTATAGCA | 43 | GGTGAAATTCAATGCAAGTGGTC | 89 | 55 | 1,109 |
| ex10-11 | | | | | | |
| NAPG | CCACCATGGTCATGAGGCAT | 44 | GGATATCCCTAATCTATTCCCAAG | 90 | 55 | 405 |
| ex12 | | | | | | |
| FAM38B | GCTCCACCACCCATCTTATG | 45 | CTGCCTTACGCAGATAACATTTG | 91 | 55 | 299 |
| ex1 | | | | | | |
| FAM38B | GAAGGTGGGACCTGACTGGA | 46 | CGTTGACTATTGACCCAAACCT | 92 | 58 | 753 |
| ex2-3 | | | | | | |
| FAM38B | GTTGGAATGATGAAGGGGAAATTC | 47 | GTTCCACAACGATTCCCACTG | 93 | 55 | 395 |
| ex4 | | | | | | |
| FAM38B | CAGTTAAGGAACTGCTTGAGCT | 48 | TGCCTTCATTGTGAGCAGAAGT | 94 | 55 | 331 |
| ex5 | | | | | | |
| FAM38B | CTCAGGATGCAGAGAAGAGC | 49 | TTCCCACCACCTCAGGCCAT | 95 | 55 | 250 |
| ex6 | | | | | | |
| FAM38B | AGTGCAATGGAACACTCAAGAC | 50 | CCCAACTCCATGTTTAGACTGG | 96 | 55 | 389 |
| ex7 | | | | | | |
| FAM38B | TGACCGTTGTGGACCCAATG | 51 | GAAGTTGCATTCCTCATACACATG | 97 | 55 | 351 |
| ex8 | | | | | | |
| FAM38B | GAGAGTTTTGACTGTAATAGGAAC | 52 | TGTCACACAGGGAGAGATAACT | 98 | 55 | 371 |
| ex9 | | | | | | |
| FAM38B | TTAGTAACCAGATTTTGCCATCTG | 53 | CCCACTCTCAACTTTACATGATAC | 99 | 55 | 345 |
| ex10 | | | | | | |
| FAM38B | CTTCTACAGAATTTGAGGGAAAGT | 54 | TCCGTCGAACTAGAAATGCTTAG | 100 | 55 | 455 |
| ex11 | | | | | | |
| AMAC1L1 | CCACCTCAGGATAGTTCCAG | 55 | CCTCTGAATGGTTAGGTCCTTA | 101 | 55 | 1239 |
| GNAL ex1 | CTGGGCGTTAGCAAGTGATC | 56 | CCCACAGTTTAAACGCTCTGTA | 102 | 55 | 843 |

Primers used in RT-PCR experiments

| | | | | | | |
|---|---|---|---|---|---|---|
| APCDD1- | ATGCCACCCAGAGGATGTTC | 57 | GATGGTCAGGTCTGCCTTTG | 103 | 60 | 155 |
| rtpcr | | | | | | |
| KRT15- | GGGTTTTGGTGGTGGCTTTG | 58 | TCGTGGTTCTTCTTCAGGTAGGC | 104 | 60 | 474 |
| rtpcr | | | | | | |
| B2M- | CACAGCCCAAGATAGTTAAGTG | 59 | GCATAAAGTGTAAGTGTATAAGCATA | 105 | 60 | 143 |
| rtpcr | | | | | | |
| APCDD1L- | GTGGAGGAGCTGTACCTGG | 60 | GGCAATGAGGCCACAGGCT | 106 | 60 | 135 |
| rtpcr | | | | | | |
| CORIN- | GGCTGTGTCCTCATTGCCAA | 61 | GTCTTCACAAAGCGTGTCTGC | 107 | 60 | 146 |
| rtpcr | | | | | | |
| α-SMA- | CCGACCGAATGCAGAAGGA | 62 | ACAGAGTATTTGCGCTCCGAA | 108 | 60 | 88 |
| rtpcr | | | | | | |

Primers used to make the probes for in situ hybridization

| | | | | | | |
|---|---|---|---|---|---|---|
| APCDD1- | AGGACCTCGCAGAAGACAGT | 63 | GTGTCTTGATCACAGTCCCAA | 109 | 55 | 613 |
| ISH | | | | | | |

[0274] Exon 1 and adjacent boundary sequences of the APCDD1 gene were amplified using Platinum® Taq DNA Polymerase High Fidelity (Invitrogen). Due to the high G/C content, DMSO (final 5%) and MgSO₄ (final 1.6 mM) were added to the PCR reaction. Amplification conditions were 94° C. for 2 min, followed by 35 cycles of 94° C. for 30 sec, 61° C. for 30 sec, and 68° C. for 50 sec, with a final extension at 68° C. for 7 min. Other exons, as well as the exon-intron boundaries of the APCDD1 gene, were amplified using Platinum® PCR SuperMix (Invitrogen). Amplification conditions were 94° C. for 2 min, followed by 35 cycles of 94° C. for 30 sec, 56° C. for 30 sec, and 72° C. for 50 sec, with a final extension at 72° C. for 7 min.

[0275] To screen for the mutation 26T>G (L9R), a part of exon 1 and intron 1 of the APCDD1 gene was amplified by PCR using Platinum® Taq DNA Polymerase High Fidelity (Invitrogen) and the following primers: forward (5′-CCAGAGCAGGACTGGAAATG-3′; SEQ ID NO: 7), reverse (5′-CGCCAAGGGGACAGTGTAG-3′; SEQ ID NO: 8). DMSO (final 5%) and MgSO₄ (final 1.6 mM) were added to the PCR reaction. The amplification conditions were 94° C. for 2 min, followed by 35 cycles of 94° C. for 30 sec, 59° C. for 30 sec, and 68° C. for 30 sec, with a final extension at 68° C. for 7 min. The amplified PCR products, 191 bp in size, were digested with DdeI at 37° C. overnight, and run on 2.0% agarose gels.

[0276] Analysis of copy number of APCDD1 gene. Using the genomic DNA from the affected individual with 18p deletion and a control individual, copy number of APCDD1 gene was analyzed by real-time PCR on an ABI 7300 (Applied Biosystems). PCR reactions were performed using ABI SYBR Green PCR Master Mix, 300 nM primers, 50 ng genomic DNA at the following consecutive steps: (a) 50° C. for 2 min, (b) 95° C. for 10 min, (c) 40 cycles of 95° C. for 15 sec and 60° C. for 1 min. Using the accompanying software, the samples were normalized to GAPDH gene which resides on human chromosome 12p. The following primers were used: APCDD1 (forward 5′-GTCTAGTTAGAGTGTGGCCAG-3′[SEQ ID NO: 9], reverse 5′-GATGGTCAGGTCTGCCTTTG-3′ [SEQ ID NO: 10]), GAPDH (forward 5′-ATGGACA CGCTCCCCTGACT-3′[SEQ ID NO: 11], reverse 5′-GAAAGGTGGGAGC CTCAGTC-3′ [SEQ ID NO: 12]).

[0277] Cell culture. HEK293T (human embryonic kidney) cells were cultured in Dulbecco's modified Eagle's medium (DMEM; GIBCO) supplemented with 10% fetal bovine serum (FBS; GIBCO), 100 IU/ml penicillin, and 100 μg/ml streptomycin. To establish primary dermal papilla cultures intact human dermal papillae were isolated from scalp tissue and dissected using tungsten needles in sterile DMEM as previously described³⁰. Dermal papilla cells were cultured in DMEM supplemented with 10% FBS, 100 IU/ml penicillin, and 100 μg/ml streptomycin.

[0278] RT-PCR. Total RNA were isolated from 10 plucked human scalp hairs of a healthy control individual, as well as fresh and cultured dermal papilla (DP) cells (passages 0, 1, 3, and 5) using the RNeasy® Minikit (Quiagen). 1 μg of total RNA was reverse-transcribed with oligo-dT primers and SuperScript™ III (Invitrogen). The cDNAs from the plucked hairs were amplified by PCR using Platinum® PCR SuperMix and primer pairs for APCDD1, keratin 15 (KRT15), and beta-2 microgloblin (B2M) genes (Table 4). Primers for the KRT15 gene were designed as described previously¹¹. The amplification conditions were 94° C. for 2 min, followed by 35 cycles of 94° C. for 30 sec, 60° C. for 30 sec and 72° C. for 30 sec, with a final extension at 72° C. for 7 min. PCR products were run on 1.5% agarose gels.

[0279] Using the cDNAs from fresh and cultured DP cells, semiquantitative RT-PCR was performed with primers for APCDD1, APCDD1L, CORIN, alpha-smooth muscle actin (αSMA), and B2M (Table 4). Primers for the αSMA gene were designed as described previously³¹. CORIN is a DP-specific marker, and its expression has been shown to decrease in cultured DP cells³². αSMA is another control, of which expression is low in fresh DP cells and high in cultured mouse DP cells³³. The different cDNAs were equalized using B2M primers as an internal control. Aliquots of each PCR reaction were taken at 26, 29, 32, and 35 cycles, and analyzed on 1.5% agarose gels. Using the same cDNAs, the expression levels of APCDD1 gene were measured by real-time PCR on an ABI 7300 (Applied Biosystems). PCR reactions were performed using ABI SYBR Green PCR Master Mix, 300 nM primers, 20 ng cDNA at the following consecutive steps: (a) 50° C. for 2 min, (b) 95° C. for 10 min, (c) 40 cycles of 95° C. for 15 sec and 60° C. for 1 min. The samples were run in triplicate and normalized to an internal control (B2M) using the accompanying software.

[0280] APCDD1-expression vectors. To generate the expression construct for the C-terminal hemagglutin (HA)-tagged human APCDD1, the full length APCDD1 cDNA sequences were amplified by PCR using the first strand cDNA from plucked human hairs as a template and the following primers: forward (5′-AAAACTCGAGCCAGAGCAGGACTG GAAATG-3′ [SEQ ID NO: 13]), reverse (5′-AAAAGCTAGCTCAGGCGTAGTCGGGC ACGTCGTAGGGGTATCTGCGGATGTTCCAATGC-3′ [SEQ ID NO: 14]). To generate the c-myc-tagged wild-type APCDD1 expression construct, the following reverse primer was used: (5′-AAAAGCTAGCTACAGATCCTCTTCAGAGATGAGTTTCTGCTCTC TGCGGATGTTCCAATGC-3′ [SEQ ID NO: 15]). The amplified products were subcloned into the XhoI and NheI sites of the mammalian expression vector pCXN2.1³⁴, a slightly modified version of pCXN2³⁵ with multiple cloning sites. L9R and L9V mutant APCDD1 sequences were PCR-amplified using the HA-tagged-wild-type APCDD1 construct as a template and the following forward primers: L9R-F (5′-AAAACTCGAGCCAGAGCAGGA CTGGAAATGTCCTGGCCGCGCCGCCTCCTGCGCAGAT-3′ [SEQ ID NO: 16]), L9V-F (5′-AAAACTCGAGCCAGAGCAGGACTGGAAATGTCCTGGCCGCGCCGCCTCC

[0281] TGGTCAGAT-3′ [SEQ ID NO: 17]). Note that T>G and C>G substitutions were introduced into the primers, respectively (shown in bold and underlined). The reverse primer was the same as used in generating the HA-tagged-wild-type APCDD1 construct. The amplified products were subcloned into the XhoI and NheI sites of the pCXN2.1.

[0282] Transient transfections and western blots. HEK293T cells were plated in 60 mm dishes the day before transfection. Expression plasmids of APCDD1 were transfected with Lipofectamine™ 2000 (Invitrogen) at 60% confluency. Total amount of transfected plasmids were adjusted with the empty pCXN2.1 vector. The cells were cultured 24 h after transfection in DMEM with 10% FBS, and the medium was changed to DMEM without FBS. 48 h after the medium change, the cells were harvested and homogenized by sonication in 25 mM HEPES-NaOH (pH 7.4), 10 mM MgCl2, 250 mM Sucrose, and 1× Complete Mini Protease Inhibitor Cocktail (Roche Applied Science). The cell debris was removed by centrifugation at 3,000 rpm for 10 min at 4° C., and the supernatant was collected as total cell lysates. The cultured medium with 1× Complete Mini Protease Inhibitor Cocktail was centrifuged at 1,500 rpm for 5 min at 4° C. The supernatant was purified with 0.2 μm syringe filters (Thermo Fisher Science), and concentrated using Amicon Ultra-15 Centrifugal Filter Unit with Ultracel-10 Membrane (Millipore) according to the manufacturer's recommendations. To examine the N-Glycosylation of APCDD1, the total cell lysates from the wild-type APCDD1 expressing cells were treated with PNGase F (Sigma) following the manufacturer's recommendations. Total cell lysates from human scalp skin were extracted by homogenization in 50 mM Tris-HCl (pH 8.0), 150 mM NaCl, 1.0% NP40, 0.5% sodium deoxycholate, 0.1% SDS, and 1× Complete Mini Protease Inhibitor Cocktail. All samples were mixed with equal amount of Laemmli Sample Buffer (Bio-Rad Laboratories) containing 5% β-mercaptoethanol, boiled at 95° C. for 5 min, and analyzed by 10% SDS-polyacrylamide gel electrophoresis (SDS-PAGE). Western blots were performed as described previously³⁶. The primary antibodies used were rat monoclonal anti-HA 3F10 (diluted 1:1,000; Roche Applied Science), mouse polyclonal anti-APCDD1 (1:1,000; Abnova) and rabbit polyclonal anti-β-actin (1:10,000; Sigma).

[0283] Immunoprecipitation. Expression plasmids of HA-tagged APCDD1 and c-myc-tagged APCDD1 (4 μg each) were co-transfected into HEK293T cells as described above. 48 h after the transfection, the cells were harvested and homogenized in lysis buffer (50 mM Tris-HCl (pH 8.0), 150 mM NaCl, 0.5% NP40, and 1× Complete Mini Protease Inhibitor Cocktail). Total cell lysates were collected by centrifugation at 14,000 rpm for 20 min at 4° C. The samples were incubated with 0.3 μg of normal rabbit IgG (Santa Cruz Biotechnology) and 10 μl of protein A/G plus agarose (Santa Cruz) for 30 min at 4° C., and centrifuged at 10,000 rpm for 1 min at 4° C. The supernatants were incubated with 1.0 μg of either rabbit polyclonal anti-c-myc antibody (Santa Cruz) or normal rabbit IgG for overnight at 4° C. Then, 20 μl of Protein A/G Plus Agarose was added into the samples, and incubated for 2 h at 4° C. The agarose beads were washed with lysis buffer for five times. The precipitated proteins were eluted with Laemmli Sample Buffer containing 5% β-mercaptoethanol, boiled at 95° C. for 5 min, and separated by 10% SDS-PAGE. Western blots were performed using rat monoclonal anti-HA 3F10 (diluted 1:1,000).

[0284] In situ hybridization. A part of the human APCDD1 cDNA (GenBank Accession number, NM_{—}153000: nt. 1775-2387) was cloned into pCR®II-TOPO vector (Invitrogen). The antisense and sense DIG-labeled cRNA probes were synthesized from the linearized vectors with T7 and SP6 RNA polymerases (Roche Applied Science), respectively. Dissected human hair follicles were fixed with 4% paraformaldehyde-PBS at 4° C. overnight. After dehydration step with 30% sucrose-PBS, the tissues were frozen in OCT compound and sectioned on glass slides at the thickness of 7 μm. In situ hybridization was performed following the methods described previously with minor modifications³⁷. At the prehybridization steps, the sections were treated with 1 μg/ml Protease K for 10 min at 37° C. Hybridization was performed at 58° C. overnight.

[0285] Indirect immunofluorescence (IIF). IIF on cultured cells and fresh frozen sections of individually dissected hair follicles was performed as described previously³⁶. IIF on HEK293T cells were performed 48 h after the expression constructs of HA-tagged APCDD1 were transfected. The primary antibodies used were mouse polyclonal anti-APCDD1 (diluted 1:1,000; Abnova), rat monoclonal anti-HA 3F10 (1:1,000), and rabbit polyclonal anti-K71 (1:10,000)³⁷.

### REFERENCES

[0286] 1. Toribio, J. & Quiñones, P. A. Hereditary hypotrichosis simplex of the scalp. Evidence for autosomal dominant inheritance. Br. J. Dermatol. 91, 687-696 (1974).
[0287] 2. Bentley-Philips, B. & Grace, H. J. Hereditary hypotrichosis. A previously undescribed syndrome. Br. J. Dermatol. 101, 331-339 (1979).
[0288] 3. Baumer, A., Belli, S., Trüeb, R. M. & Schinzel, A. An autosomal dominant form of hereditary hypotrichosis simplex maps to 18p11.32-p11.23 in an Italian family. Eur. J. Hum. Genet. 8, 443-448 (2000).
[0289] 4. Schmidt-Ullrich, R. & Paus, R. Molecular principles of hair follicle induction and morphogenesis. Bioessays 27, 247-261 (2005).
[0290] 5. van Steensel, M. et al. The gene for hypotrichosis of Marie Unna maps between D8S258 and D8S298: exclusion of the hr gene by cDNA and genomic sequencing. Am. J. Hum. Genet. 65, 413-419 (1999).
[0291] 6. Winter, H. et al. Mutations in the hair cortex keratin hHb6 cause the inherited hair disease monilethrix. Nat. Genet. 16, 372-374 (1997).
[0292] 7. van Steensel, M. A., Steijlen, P. M., Bladergroen, R. S., Vermeer, M. & van Geel, M. A missense mutation in the type II hair keratin hHb3 is associated with monilethrix. J. Med. Genet. 42, e19 (2005).
[0293] 8. Kljuic, A. et al. Desmoglein 4 in hair follicle differentiation and epidermal adhesion: evidence from inherited hypotrichosis and acquired pemphigus vulgaris. Cell 113, 249-260 (2003).
[0294] 9. LinksIbsen, H. H., Clemmensen, O. J. & Brandrup, F. Familial hypotrichosis of the scalp. Autosomal dominant inheritance in four generations. Acta. Derm. Venereol. 71, 349-351 (1991).
[0295] 10. Levy-Nissenbaum, E. et al. Hypotrichosis simplex of the scalp is associated with nonsense mutations in CDSN encoding corneodesmosin. Nat. Genet. 34, 151-153 (2003).
[0296] 11. Pasternack, S. M. et al. G protein-coupled receptor P2Y5 and its ligand LPA are involved in maintenance of human hair growth. Nat. Genet. 40, 329-334 (2008).
[0297] 12. Takahashi, M. et al. Isolation of a novel human gene, APCDD1, as a direct target of the beta-Catenin/T-cell factor 4 complex with probable involvement in colorectal carcinogenesis. Cancer Res. 62, 5651-5656 (2002).
[0298] 13. Kantaputra, P. N. et al. Contiguous gene syndrome of holoprosencephaly and hypotrichosis simplex: association with an 18p11.3 deletion. Am. J. Med. Genet. A. 140, 2598-2602 (2006).
[0299] 14. Jukkola, T., Sinjushina, N. & Partanen, J. Drapc1 expression during mouse embryonic development. Gene. Expr. Patterns. 4, 755-762 (2004).
[0300] 15. Pidasheva, S., Canaff, L., Simonds, W. F., Marx, S. J. & Hendy, G. N. Impaired cotranslational processing of the calcium-sensing receptor due to signal peptide missense mutations in familial hypocalciuric hypercalcemia. Hum. Mol. Genet. 14, 1679-1690 (2005).
[0301] 16. Jahoda, C. A., Reynolds, A. J. & Oliver, R. F. Induction of hair growth in ear wounds by cultured dermal papilla cells. J. Invest. Dermatol. 101, 584-590 (1993).
[0302] 17. Fitches, A. C. et al. Impaired cotranslational processing as a mechanism for type I antithrombin deficiency. Blood 92, 4671-4676 (1998).
[0303] 18. Uchida, I. A., McRae, K. N., Wang, H. C. & Ray, M. Familial short arm deficiency of chromosome 18 concomitant with arhinencephaly and alopecia congenital. Am. J. Hum. Genet. 17, 410-419, 1965.
[0304] 19. Jacobsen, P. & Mikkelsen, M. The 18p-syndrome. Report of two cases. Ann. Genet. 11, 211-216, 1968.
[0305] 20. Zouboulis, C. C. et al. Ulerythema ophryogenes and keratosis pilaris in a child with monosomy 18p. Pediatr. Dermatol. 11, 172-175 (1994).
[0306] 21. Nazarenko, S. A. et al. Keratosis pilaris and ulerythema ophryogenes associated with an 18p deletion caused by a Y/18 translocation. Am. J. Med. Genet. 85, 179-182 (1999).
[0307] 22. Zirn, B. et al. Target genes of the WNT/beta-catenin pathway in Wilms tumors. Genes Chromosomes Cancer 45, 565-574 (2006).
[0308] 23. Kuraku, S., Usuda, R. & Kuratani, S. Comprehensive survey of carapacial ridge-specific genes in turtle implies co-option of some regulatory genes in carapace evolution. Evol Dev. 7, 3-17 (2005).
[0309] 24. DasGupta, R. & Fuchs E. Multiple roles for activated LEF/TCF transcription complexes during hair follicle development and differentiation. Development 126, 4557-4568 (1999).
[0310] 25. Botchkarev, V. A. & Paus R. Molecular biology of hair morphogenesis: development and cycling. J. Exp. Zoolog. B Mol. Dev. Evol. 298, 164-180 (2003).
[0311] 26. Cribier, B., Peltre, B., Grosshans, E., Langbein, L. & Schweizer, J. On the regulation of hair keratin expression: lessons from studies in pilomatricomas. J. Invest. Dermatol. 122, 1078-1083 (2004).
[0312] 27. Martinez-Mir, A. et al., Genomewide scan for linkage reveals evidence of several susceptibility loci for alopecia greata. Am. J. Hum. Genet. 80, 316-328 (2007).
[0313] 28. Hillmer, A. M. et al. Genome-wide scan and fine-mapping linkage study of androgenetic alopecia reveals a locus on chromosome 3q26. Am. J. Hum. Genet. 82, 737-743 (2008).
[0314] 29. Trüleb, R. M. Molecular mechanisms of androgenic alopecia. Exp. Gerontol. 37, 981-990 (2002).
[0315] 30. Messenger, A. G. The culture of dermal papilla cells from human hair follicles. Br. J. Dermatol. 110, 685-689 (1984).
[0316] 31. Knerr, I. et al. Alteration of neuronal and endothelial nitric oxide synthase and neuropeptide Y in congenital ureteropelvic junction obstruction. Urol. Res. 29, 134-140 (2001).
[0317] 32. Enshell-Seijffers, D., Lindon, C. & Morgan, B. A. The serine protease Corin is a novel modifier of the Agouti pathway. Development 135, 217-225 (2008).
[0318] 33. Jahoda, C. A., Reynolds, A. J., Chaponnier, C., Forester, J. C. & Gabbiani, G. Smooth muscle alpha-actin is a marker for hair follicle dermis in vivo and in vitro. J. Cell Sci. 99, 627-636 (1991).
[0319] 34. Noguchi, K., Ishii, S. & Shimizu, H. Identification of p2y9/GPR23 as a novel G protein-coupled receptor for lysophosphatidic acid, structurally distant from the Edg family. J. Biol. Chem. 278, 25600-25606 (2003).
[0320] 35. Niwa, H., Yamamura, K. & Miyazaki, J. Efficient selection for high-expression transfectants with a novel eukaryotic vector. Gene 108, 193-199 (1991).
[0321] 36. Bazzi, H. et al. Desmoglein 4 is expressed in highly differentiated keratinocytes and trichocytes in human epidermis and hair follicle. Differentiation 74, 129-140 (2006).
[0322] 37. Aoki, N. et al. A novel type II cytokeratin, mK6irs, is expressed in the Huxley and Henle layers of the mouse inner root sheath. J. Invest. Dermatol. 116, 359-365 (2001).

### Example 2

### Swamp is an Inhibitor of the Wnt/β-Catenin Pathway in which Mutations Underlie Hereditary Hypotrichosis Simplex

[0323] Using genetic linkage analysis, we identified a mutation (L9R) in the APCDD1 gene, which we now rename SWAMP, on chromosome 18p11.22 of two Pakistani families with HHS. SWAMP is expressed in the dermal papilla, the matrix, and the hair shaft of human HFs. It is a membrane-bound glycoprotein that can interact with WNT3A and LRP5, two essential components of the Wnt/β-catenin signaling. Functional studies in cell lines, revealed that SWAMP inhibits Wnt signaling in a cell autonomous manner and functions upstream of β-catenin. SWAMP inhibits the activation of the Wnt/β-catenin pathway in HEK293T cells transfected with WNT3A, LRP5 and Fzd2. The mutation L9R, localized in the signal peptide of the SWAMP protein, perturbs its translational processing from ER to the plasma membrane. In addition, L9R SWAMP functions in a dominant-negative manner to inhibit the stability and membrane localization of the wild type protein, thus impairing its normal function in HHS patients. These findings uncover an inhibitor of the Wnt/β-catenin signaling pathway with an essential role in human hair growth. Since SWAMP is expressed in many other cells^{A3}, our findings suggest that SWAMP is a regulator of many biological processes controlled by the Wnt/β-catenin signaling.

[0324] We performed a genetic linkage study in two large Pakistani families (HHS1 and HHS2) with autosomal dominant HHS (FIG. 1 and FIG. 5). We used human mapping arrays with low density (Affymetrix 10K) to genotype 16 and 12 members of each family, respectively. Parametric linkage analysis performed under a dominant model yielded a maximum LOD score of z=4.6 for a haplotype on chromosome 18p11.22 (FIG. 1G). The 2LOD interval spanned from 7.4 Mb to 25 Mb. Genotyping with microsatellite markers enabled us to define the candidate region to 1.8 Mb between the markers RAB31-MS and GNAL-MS (FIG. 1H and FIG. 2B, bottom panel, and FIG. 6), which contained 8 known genes, 4 pseudogenes and 3 predicted transcripts (FIG. 2A).

[0325] Direct sequencing analysis of all known genes in the region identified a single heterozygous mutation 26T>G (L9R) in the signal peptide sequence of the Adenomatosis Polyposis Coli Down-regulated 1 (APCDD1) gene (FIG. 2B), described initially as being downregulated by the tumor suppressor APC^{A8}. Based on our functional studies, we hereafter designate the gene as SWAMP (cell Surface-localized Wnt Antagonist Mutated in hyPotrichosis). The mutation L9R cosegregates with the disease phenotype in both families, was absent in 200 unrelated healthy control Pakistani individuals and in the SNP databases, arguing against it being a polymorphism (FIG. 1H and FIG. 2B, bottom panel, and FIG. 6). In addition, surprisingly, we have also identified the identical heterozygous mutation 26T>G (L9R) in the SWAMP gene in an Italian family with autosomal dominant HHS that we reported previously (FIG. 7, FIG. 8)^{A2}. Interestingly, several other autosomal dominant diseases, such as familial hypocalciuric hypercalcemia (OMIM 145980)^{A9} and antithrombin III deficiency^{A10} are also known to be caused by substitutions in a leucine residue in the signal peptide.

[0326] We next examined SWAMP expression in human HFs. Unlike the related APCDD1L, SWAMP was present in human scalp skin by RT-PCR (FIG. 18). In situ hybridization and immunofluorescence with an anti-SWAMP antibody (Abnova), revealed that SWAMP was expressed in the dermal papilla (DP), the matrix and differentiating cells in the hair shaft (FIG. 15A-E). Western blot from the human scalp skin with the SWAMP antibody showed two bands of 58 and 130 kDa, probably corresponding to a monomer and a dimer, respectively (FIG. 14). The mouse Swamp (also known as Drapc1, Apcdd1) mRNA is also expressed in the adult mouse HFs^{A3}, suggesting that its function can be conserved in HF development in mammals.

[0327] Several lines of evidence, including its activation by Wnt signaling^{A8}, the similarity in expression pattern with another Wnt inhibitor Wise^{A11}, the presence of other Wnt inhibitors in the HF (e.g. Dkk4)^{A12}, indicate that SWAMP can function as an inhibitor of Wnt signaling in a negative feedback loop^{A13}. It is noteworthy that SWAMP contains 12 highly conserved cysteine residues (FIG. 9), a structural feature present in many inhibitors of Wnt signaling and is important for interaction with Wnt ligands or their receptors^{A13, A14}._To test whether SWAMP could inhibit Wnt signaling, we first determined if it can interact with ligands and receptors of the canonical Wnt pathway. No interaction was found with Fzd2, Fzd8, and Dkk4. In contrast, Wnt3A, important for HF induction^{A15}, and LRP5, expressed in HF (FIG. 17B) coprecipitated with the extracellular domain of SWAMP (SWAMPΔTM) (FIG. 18). This suggests that SWAMP can modulate the Wnt pathway, via interaction with both WNT3A and LRP5 at the cell surface. We also investigated which domain of SWAMP mediates the Wnt inhibitory activity and the cells where SWAMP functions to inhibit the pathway and found that the Wnt inhibitory activity resides within the extracellular domain. SWAMP could affect either the signaling cell, by regulating Wnt secretion^{A25}, or the receiving cell. We conclude that SWAMP inhibits Wnt signaling in the cell autonomously, in the receiving cell.

[0328] The SWAMP protein is 58 KDa in size, predicted to consist of an N-terminal signal peptide, an extracellular domain (with an N-glycosylation site at position 168), a transmembrane domain, and a C-terminal cytoplasmic domain of only two amino acids (FIG. 3A). Western blot of SWAMP expressed in HEK293T cells revealed that the protein is glycosylated and forms a dimer (FIG. 19A-C). Moreover, Wt-SWAMP is localized to the plasma membrane when transfected in a cell line (FIGS. 20A, 20C, and 20F). We tested if full length SWAMP could be cleaved to function as a diffusible Wnt inhibitor (SWAMPΔTM), but the protein was not detected in the medium of SWAMP-expressing cells, indicating that SWAMP is membrane-tethered (FIG. 19D).

[0329] The L9R mutation is predicted to disrupt the hydrophobic core of the signal peptide critical for co-translational processing of the SWAMP protein (FIG. 3B, FIG. 10)^{A9}. We analyzed protein stability and localization by western blotting and immunofluorescence, respectively, in two cell lines (HEK293T or Bend3.0) transfected with either wild type (Wt) SWAMP or two different mutations (L9R and L9V). Two fragments of 68 KDa and 130 KDa were detected in lysates of the Wt- and the conservative mutant L9V-SWAMP-transfected cells. Wt- or L9V-SWAMP protein was localized to the cell membrane, while the L9R-SWAMP was retained within the endoplasmic reticulum (ER) (FIG. 20A-H). Furthermore, overexpression of an N-terminal GFP-tagged Wt- or L9R-SWAMP protein revealed that the mutant protein was not able to undergo cleavage or localize to the membrane (FIG. 20I-K). Therefore, the L9R mutation can function in dominant-negative manner, by destabilizing the Wt protein and preventing it from reaching the plasma membrane.

[0330] Collectively, we have shown that SWAMP is a membrane-tethered Wnt inhibitor in vivo. Since SWAMP is a direct target gene of Wnt signaling^{A8}, it can function to terminate the Wnt signal via negative feedback regulation^{A13}. The interaction of SWAMP with LRP5 and WNT3A via its extracellular domain suggests that SWAMP can prevent formation of the Wnt receptor complex (FIG. 16A). The L9R mutant is unable to repress Wnt-responsive reporters and genes, or their effect on proliferation and the generation of neurons in vivo. Moreover, our expression studies in cultured cells suggest that the L9R-SWAMP can force the Wt protein to be retained in the ER where it can undergo degradation (FIG. 16B).

[0331] Since the L9R mutation abrogates the function of the Wt protein, we predict an increase in Wnt signaling in the HF in HHS. The lack of samples from HHS patient's scalp precluded us from verifying this assumption. Nevertheless, our data in human cell lines have determined that L9R mutant SWAMP functions as a dominant-negative for the Wt protein. Studies in mice have shown that activation of Wnt signaling caused increased hair follicle density and hair follicle-derived tumors^{A27}. In contrast, mice mutant for the Wnt inhibitor Klotho show reduced hairs due to upregulation of Wnt signaling and depletion of the stem cell pool^{A28}. SWAMP is expressed in the matrix of the human HFs (FIG. 15A-E), which contains a pool of proliferating progenitors derived from the stem cell niche in the HF-bulge. We predict that upregulation of Wnt signaling in matrix cells can deplete the HF stem cell pool and cause HHS in humans. Our study provides the first genetic evidence that mutations in a Wnt inhibitor result in a hair disorder in humans. SWAMP can have a broader role in polygenic HF disorders beyond HHS, since its localization on chromosome 18 coincides with our previous linkage data in families with alopecia greata (max LOD=3.93)^{A30}, as well as linkage studies in families with AGA (max NPL score=2.56)^{A5}. Since SWAMP is widely expressed in many organs^{A3}, our findings raise the possibility that, as a Wnt inhibitor, SWAMP plays a crucial role in other processes controlled by Wnt signaling, such as early embryonic development, stem cell renewal, nervous system development, and cancer.

[0332] Methods

[0333] Linkage analysis. Genome-wide SNP-based genotyping was performed using the Affymetrix Human Mapping 10K 2.0 Array. Quality control and data analysis was performed with Genespring GT (Agilent software). Briefly, SNPs that violated a Mendelian inheritance pattern were removed from the data set prior to analysis. Haplotypes were inferred from raw genotype data. By analyzing haplotypes rather than individual SNPs, type I error introduced by linkage disequilibrium between markers is mitigated. Finally, haplotypes were analyzed for linkage under the assumption of a fully penetrant disease gene with a frequency of 0.001 transmitted by a dominant mode of inheritance.

[0334] Mutation analysis. Using the genomic DNA of the family members, all exons and exon-intron boundaries of SWAMP gene were amplified by PCR with the gene-specific primers (Table 4). In addition, the following primers in Table 5 were also used.

TABLE 5
Additional Primers Used.

| | | | | | | |
|---|---|---|---|---|---|---|
| | | | | | | Product |
| | forward primer | SEQ ID | reverse primer | SEQ ID | Annealing | size |
| Primer Name | (5′ to 3′) | NO: | (5′ to 3′) | NO: | Temp (C.°) | (bp) |

Primers used in RT-PCR experiments

| | | | | | | |
|---|---|---|---|---|---|---|
| LRP5-rtpcr | GACCCAGCCCTT | 9717 | TGTGGACGTTGAT | 9718 | 56 | 138 |
| | TGTTTTGAC | | GGTATTGGT | | | |
| WNT3A-rtpcr | GCCCCACTCGGA | 9719 | GAGGAATACTGTG | 9720 | 56 | 98 |
| | TACTTCTTACT | | GCCCAACA | | | |

Primers used to generate the probes for in situ hybridization

| | | | | | | |
|---|---|---|---|---|---|---|
| SWAMP-ISH | CCAGAGCAGGA | 9721 | CTATCTGCGGATG | 9722 | 60 | 1562 |
| | CTGGAAATG | | TTCCAATGC | | | |

[0335] The PCR products were directly sequenced in an ABI Prism 310 Automated Sequencer, using the ABI Prism Big Dye Terminator Cycle Sequencing Ready Reaction Kit (PE Applied Biosystems). The mutation 26T>G disrupts a DdeI restriction enzyme site, which was used to screen the family members and control individuals.

[0336] Clinical details and DNA extraction. Informed consent was obtained from all subjects. The study was conducted in adherence to the Declaration of Helsinki Principles. Peripheral blood samples were collected from family members as well as unrelated healthy control individuals of Pakistani and European origin (200 individuals each). Genomic DNA was isolated from these samples using the PUREGENE DNA isolation kit (Gentra System).

[0337] Genotyping. Genomic DNA from members of two Pakistani families was amplified by PCR using Platinum® PCR SuperMix (Invitrogen) and primers for microsatellite markers on chromosome 18p11. The amplification conditions for each PCR were 94° C. for 2 min, followed by 35 cycles of 94° C. for 30 sec, 55° C. for 30 sec, and 72° C. for 30 sec, with a final extension at 72° C. for 7 min. PCR products were run on 8% polyacrylamide gels and genotypes were assigned by visual inspection.

[0338] Mutation analysis of the SWAMP gene. Exon 1 and the adjacent boundary sequences of the SWAMP gene were amplified using Platinum® Taq DNA Polymerase High Fidelity (Invitrogen). Due to the high G/C content, DMSO (final 5%) and MgSO₄ (final 1.6 mM) were added to the PCR reaction. The amplification conditions were 94° C. for 2 min, followed by 35 cycles of 94° C. for 30 sec, 61° C. for 30 sec, and 68° C. for 50 sec, with, a final extension at 68° C. for 7 min. Other exons, as well as the exon-intron boundaries of the SWAMP gene, were amplified using Platinum® PCR SuperMix (Invitrogen). The amplification conditions were 94° C. for 2 min, followed by 35 cycles of 94° C. for 30 sec, 56° C. for 30 sec, and 72° C. for 50 sec, with a final extension at 72° C. for 7 min.

[0339] To screen for the mutation 26T>G (L9R), a part of exon 1 and intron 1 of the SWAMP gene was amplified by PCR using Platinum® Taq DNA Polymerase High Fidelity (Invitrogen) and the following primers: forward (5′-CCAGAGCAGGACTG GAAATG-3′) [SEQ ID NO: 9723], reverse (5′-CGCCAAGGGGACAGTGTAG-3′) [SEQ ID NO: 9724]. DMSO (final 5%) and MgSO₄ (final 1.6 mM) were added to the PCR reaction. Amplification conditions were 94° C. for 2 min, followed by 35 cycles of 94° C. for 30 sec, 59° C. for 30 sec, and 68° C. for 30 sec, with a final extension at 68° C. for 7 min. The amplified PCR products, 191 bp in size, were digested with DdeI at 37° C. overnight, and run on 2.0% agarose gels.

[0340] Cell culture. HEK293T (human embryonic kidney) cells were cultured in Dulbecco's modified Eagle's medium (DMEM; GIBCO) supplemented with 10% fetal bovine serum (FBS; GIBCO), 100 IU/ml penicillin, and 100 μg/ml streptomycin. For transfection experiments, dishes were coated with a coating medium containing 0.01 mg/ml of fibronectin (Sigma) and 0.03 mg/ml of type I collagen (Sigma) before seeding the cells so as to prevent detachment of the cells.

[0341] Anti-SWAMP antibodies. A mouse polyclonal anti-human APCDD1 (SWAMP) antibody was purchased from Abnova Corporation. This antibody was raised against the full-length human SWAMP protein. We performed epitope-mapping using three truncated GST-SWAMP proteins (amino acid (aa) residues 1-171, 166-336, and 331-514), and confirmed that the epitope of the antibody exists between aa residues 166 and 336 of the human SWAMP, which corresponds to the middle portion of the extracellular domain. This antibody recognized hair shaft and dermal papilla in human hair follicles (FIG. 15B-E), which finely overlapped with the signals detected by in situ hybridization (FIG. 15A). An affinity-purified rabbit polyclonal anti-mouse Apcdd1 (Swamp) antibody was produced by immunizing rabbits with the synthetic peptide, CQRPSDGSSPDRPEKRATSY (corresponding to the C-terminus of the extracellular domain of the mouse SWAMP protein, aa residues 441-459; SEQ ID NO: 9725) conjugated to KLH (Pierce, Rockford, Ill.). This region is completely conserved among mouse and human SWAMP proteins. The antibody was affinity-purified from the serum using the Sulfolink immobilization column (Pierce). This antibody strongly recognized human SWAMP protein in western blots and immunofluorescence.

[0342] RT-PCR in human scalp skin and plucked hairs. Total RNA were isolated from scalp skin and plucked scalp hairs of healthy control individuals using the RNeasy® Minikit (Quiagen). 2 μg of total RNA was reverse-transcribed with oligo-dT primers and Super-Script™ III (Invitrogen). The cDNAs were amplified by PCR using Platinum® PCR Super-Mix and primer pairs for SWAMP, APCDD1L, keratin 15 (KRT15), LRP5, WNT3A, and β-2 microglobulin (B2M) genes (Table 4 and Table 5). Primers for the KRT15, LRP5, and WNT3A genes were designed as described previously^{A31, A32}. Amplification conditions were 94° C. for 2 min, followed by 35 cycles of 94° C. for 30 sec, 58° C. for 30 sec and 72° C. for 30 sec, with a final extension at 72° C. for 7 min. PCR products were run on 1.5% agarose gels.

[0343] Expression vectors. To generate the expression construct for the human SWAMP (pCXN2.1-Wt-SWAMP), the full length SWAMP cDNA sequences were amplified by PCR using the first strand cDNA from human scalp skin as a template and the following primers: SWAMP-F-XhoI (5′-AAAACTCGAGCCAGAGCAGGACTGGAAATG-3′) [SEQ ID NO: 9726] and SWAMP-R-NheI (AAAAGCTAGCCTATCTGCGGATGTTCCAATGC-3′) [SEQ ID NO: 9727]. To generate the constructs for the C-terminal hemagglutin (HA)-tagged (pCXN2.1-Wt-SWAMP-HA) and the C-terminal Flag-tagged (pCXN2.1-Wt-SWAMP-Flag) SWAMP, the following reverse primers were used: SWAMP-R-HA-NheI (5′-AAAAGCT AGCTCAGGCGTAGTCGGGCACGTCGTAGGGGTATCTGCGGATGTTCCAATGC-3′) [SEQ ID NO: 9728] and SWAMP-R-Flag-NheI (5′-AAAAGCTAGCTCACTTATCGTCG TCATCCTTGTAATCTCTGCGGATGTTCCAATGC-3′) [SEQ ID NO: 9729], respectively. L9R and L9V mutant SWAMP sequences were PCR-amplified using the following forward primers: SWAMP-L9R-F-XhoI (5′-AAAACTCGAGCCAGAGCAGGACTGGAAATGTC CTGGCCGCGCCGCCTCCTGCGCAGAT-3′) [SEQ ID NO: 9730] and SWAMP-L9V-F-XhoI (5′-AAAACTCGAGCCAGAGCAGGACTGGAAATGTCCTGGCCGCGCCG CCTCCTGGTCAGAT-3′) [SEQ ID NO: 9731], respectively. Note that T>G and C>G substitutions were introduced into the primers, respectively (shown in bold and underlined).

[0344] For generating the expression constructs for truncated SWAMP (aa residues 1-486) with the C-terminal HA-tag (pCXN2.1-SWAMP-ΔTM-HA) and the C-terminal Flag-tag (pCXN2.1-SWAMP-ΔTM-Flag), the following reverse primers were used: SWAMP-ΔTM-R-HA-NheI (5′-AAAAGCTAGCTCAGGCGTAGTCGGGCACGTCGTAGGGG TAGCCATACAGGCTGCTTCCACT-3′) [SEQ ID NO: 9732] and SWAMP-ΔTM-R-Flag-NheI (5′-AAAAGCTAGCTCACTTATCGTCGTCATCCTTGTAATCGCCATACAGG CTGCTTCCACT-3′) [SEQ ID NO: 9733], respectively. The amplified products were subcloned into the XhoI and NheI sites of the mammalian expression vector pCXN2.1³³, a slightly modified version of pCXN2³⁴ with multiple cloning sites. To introduce a Flag-tag between aa residues 35 and 36 of the SWAMP protein, N-terminal region of the SWAMP was PCR-amplified using the forward primer (SWAMP-F-XhoI) and a reverse primer (SWAMP-R-Flag-AvrII: 5′-AAAACCTAGGCTTATCGTCGTCATCCTTGTAATCATGA GACCTGCTGTCTGGAT-3′) [SEQ ID NO: 9734], which was followed by digestion with restriction enzymes XhoI and AvrII. The C-terminal region of the SWAMP and the truncated SWAMP proteins with the C-terminal HA-tag was obtained through digestion of the pCXN2.1-Wt-SWAMP-HA and the pCXN2.1-SWAMP-ΔTM-HA constructs with restriction enzymes AvrII and NheI. These two fragments were ligated with AvrII site, and subsequently subcloned into the XhoI and NheI sites of the pCXN2.1 vector.

[0345] To generate expression constructs for N-terminal GFP-tagged SWAMP protein, the coding region of the SWAMP and the rabbit β-globin 3′-flanking sequences were cut out from the pCXN2.1-SWAMP constructs with restriction enzymes XhoI and BamHI, and subcloned in frame into XhoI and BamHI sites of pEGFP-C1 vector (Clontech). The templates were also subcloned into XhoI and BamHI sites of pBluescript-SK (−) vector (Stratagene). To express the GST fusion SWAMP protein in bacteria, the extracellular domain of the human SWAMP (aa residues 28-486) was PCR-amplified using the following primers: SWAMP-F-EcoRI (5′-AAAAGAATTCCCTTCATCCAGACAG CAGGTC-3′) [SEQ ID NO: 9735] and SWAMP-ΔTM-R-XhoI (5′-AAAACTCGAGTCAGCCATACA GGCTGCT TCCACT-3′) [SEQ ID NO: 9736]. The amplified fragment was subcloned in-frame into EcoRI and XhoI sites of pGEX-4T-3 vector (GE Healthcare). pGEM Wnt8, the Sia luciferase reporter gene, and pSP36 β-catenin have been previously described.

[0346] The full length mouse Swamp cDNA was amplified by RT-PCR from brain endothelial cells using the First Strand Synthesis Kit and High Fidelity Amplification Kit (Roche Applied Science) with the following primers: SwampF 5′-GGGGACAGAGAC GGACTACA-3′ [SEQ ID NO: 9739] and SwampR 5′CAAGGCATTCAAGTGCATC3′ [SEQ ID NO: 9740]. The amplified cDNA was confirmed by sequencing and subcloned into PCRII TOPO and pCAGGS vectors for in vitro transcription. The SwampΔTM isoform containing the extracellular domain of mouse Swamp (aa 1-486) was amplified by PCR from the full length cDNA using the following primers: SWAMPF 5′-GGGGACAGAGACGG ACTACA-3′ [SEQ ID NO: 9741] and SwampΔTM 5′-CTGCCCTGCCTGCCATAC AGATGACCTTGACTGTC-3′ [SEQ ID NO: 9742] and subcloned into pCAGGS vector for chick electroporation.

[0347] To generate the expression construct for the human WNT3A (pCXN2.1-WNT3A), PCR was performed using cDNA from plucked human hairs and the following primers: WNT3A-F-XhoI (5′-AAAACTCGAGCGGCGATGGCCCCACTCGGATACTT-3′) [SEQ ID NO: 9743], WNT3A-R-NheI (5′-AAAAGCTAGCCTACTTGCAGGTGTGCACG TCGT-3′) [SEQ ID NO: 9744]. For the C-terminal HA-tagged human WNT3A (pCXN2.1-WNT3A-HA), the following reverse primer was used: WNT3A-R-HA-NheI (5′-AAAAGC TAGCTAGGCGTAGTCGGGCACGTCGTAGGGGTACTTGCAGGTGTGCACGTCG-3′) [SEQ ID NO: 9745]. To generate the expression construct for the extracellular domain of the human CD40 with the C-terminal HA tag (aa residues 1-193; pCXN2.1-CD40-EC-HA), PCR was performed using human thymus cDNA as a template and the following primers: CD40-F-XhoI (5′-ATATCTCGAGCCTCGCTATGGTTCGTCTGCCT-3′) [SEQ ID NO: 9746] and CD40-R-HA-NheI (5′-ATATGCTAGCTAGGCGTAGTCGGGCACGTCGTAGGGGTAT CTCAGCCGATCCTGGGGAC-3′) [SEQ ID NO: 9747]. To generate the construct for the extracellular domain of the human LRP5 with the C-terminal Flag tag (aa residues 1-1384; pCXN2.1-LRP5-EC-Flag), the N-terminal sequences of the human LRP were PCR-amplified using the expression construct for the full-length human LRP5 as a template and the following primers: LRP5-F-EcoRI (5′-AAAAGAATTCCGGACAACATGGAGGCAG-3′) [SEQ ID NO: 9748] and LRP5-R-Flag-NheI (5′-AAAAGCTAGCTACTTATCGTCGTCA TCCTTGTAATCGCTGTGGGCCGGGCTGTCGTCTGA-3′) [SEQ ID NO: 9749]. The amplified products were subcloned into the XhoI/NheI sites (for WNT3A and CD40) or EcoRI/NheI sites (for LRP5) of the pCXN2.1 vector. To generate the expression construct for the mouse Frizzled 2 (mFzd2), the full-length open reading frame of the mFzd2 was purchased from Invitrogen (clone ID 6411627), which was subcloned into NotI sites of the pCXN2:1 vector.

[0348] Transient transfections and western blots in cultured cells and human scalp skin. HEK293T cells or Bend3.0 cells were plated in 60 mm dishes the day before transfection. Expression plasmids of SWAMP were transfected with FuGENE® 6 (Roche Applied Science) at 60% confluency for HEK293 cells or Targefect_HUVEC for Bend3.0 cells. Total amount of transfected plasmids were adjusted with the empty pCXN2.1 vector. The cells were cultured 48 h after transfection in Opti-MEM (GIBCO). The cells were harvested and homogenized by sonication in homogenization buffer (25 mM HEPES-NaOH (pH 7.4), 10 mM MgCl2, 250 mM sucrose, and 1× Complete Mini Protease Inhibitor Cocktail (Roche Applied Science)). The cell debris was removed by centrifugation at 3,000 rpm for 10 min at 4° C., and the supernatant was collected as cell lysates. To obtain membrane fraction, the cell lysates were ultracentrifuged at 100,000 g for 1 h at 4° C. The pellet was suspended with the homogenization buffer. The cultured medium with 1× Complete Mini Protease Inhibitor Cocktail was centrifuged at 1,500 rpm for 5 min at 4° C. The supernatant was purified with 0.45 μm syringe filters (Thermo Fisher Science), and concentrated using Amicon Ultra-15 Centrifugal Filter Unit with Ultracel-10 Membrane (Millipore) according to the manufacturer's recommendations. To examine the N-glycosylation of SWAMP, the cell lysates from the wild-type SWAMP expressing cells were treated with PNGase F (Sigma) following the manufacturer's recommendations. Total cell lysates from human scalp skin were extracted by homogenization in 50 mM Tris-HCl (pH 8.0), 150 mM NaCl, 1.0% NP40, 0.5% sodium deoxycholate, 0.1% SDS, and 1× Complete Mini Protease Inhibitor Cocktail. All samples were mixed with equal amount of Laemmli Sample Buffer (Bio-Rad Laboratories) containing 5% β-mercaptoethanol, boiled at 95° C. for 5 min, and analyzed by 10% SDS-polyacrylamide gel electrophoresis (SDS-PAGE). Western blots were performed as described previously^{A36}. The primary antibodies used were rabbit polyclonal anti-HA (diluted 1:4,000; Abcam), rabbit polyclonal anti-SWAMP (1:20,000), mouse polyclonal anti-APCDD1 (1:1,000; Abnova), mouse monoclonal anti-Flag M2 (1:1,000; Sigma), and rabbit polyclonal anti-β-actin (1:10,000; Sigma).

[0349] Wnt reporter assays in HEK293T cells. HEK293T cells were seeded in 12 well dishes the day before transfection. Either 100 ng of TOPFlash (active) or FOPFlash (inactive) Wnt reporter vector was transfected into each well along with constructs for WNT3A (200 ng), Fzd2 (100 ng), LRP5 (100 ng), and/or wild type SWAMP-HA (800 ng) using Lipofectamine 2000 (Invitrogen). A construct for β-galactosidase reporter (100 ng) was also transfected for normalization of transfection efficiency. The cells were lysed 36 h after transfection and the signals were assayed using the appropriate substrates for luciferase (Steady-Glo Luciferase Assay System) and β-galactosidase (Promega) on a 20/20ⁿ luminometer (Turner Biosystems) for luciferase and Model 680 microplate reader (BioRad) for β-galactosidase. The Wnt activity was measured based on the ratio of TOP/FOP luciferase activity. The results represent triplicate determination of a single experiment that is representative a total of five similar experiments.

[0350] Co-Immunoprecipitation (Co-IP) assays. Expression plasmids (total 4 μg) were transfected into HEK293T cells seeded on 60 mm dishes with FuGENE® 6 (Roche Applied Science) at 60% confluency. 24 h after the transfection, the cells were harvested and homogenized in lysis buffer (20 mM Tris-HCl (pH 7.5), 137 mM NaCl, 10% Glycerol, 2 mM EDTA, 0.5% Triton X, and 1× Complete Mini Protease Inhibitor Cocktail). Total cell lysates were collected by centrifugation at 14,000 rpm for 15 min at 4° C. The samples were incubated with either mouse monoclonal anti-Flag M2 agarose gel (Sigma) or mouse monoclonal anti-HA agarose gel (Sigma) for 3 h at 4° C. The agarose beads were washed with lysis buffer for five times. The precipitated proteins were eluted with NuPAGE® LDS Sample Buffer containing Sample Reducing Agent (Invitrogen), incubated at 75° C. for 10 min, and separated on 10% NuPAGE® gels (Invitrogen). Western blots were performed using rabbit polyclonal anti-HA (diluted 1:4,000; Abcam) or mouse monoclonal anti-Flag M2 antibody (1:1,000; Sigma).

[0351] GST pulldown assays. Expression of GST-fusion proteins was induced in DH5a (Invitrogen) by the addition of 0.1 mM isopropyl-β-D-thiogalactopyranoside at 37° C. for 3 h, and the fusion proteins were isolated from bacterial lysates by affinity chromatography with glutathione-Sepharose beads (GE Healthcare Life Sciences). HEK293T cells overexpressing LRP5-EC-Flag, WNT3A-HA, or CD40-EC-HA were dissolved in lysis buffer (20 mM Tris-HCl (pH 7.5), 137 mM NaCl, 10% Glycerol, 2 mM EDTA, 0.1% Triton X, and 1× Complete Mini Protease Inhibitor Cocktail), and centrifuged at 12,000 g at 4° C. for 30 min. Clarified supernatants were incubated in the presence of either GST alone or GST-SWAMPΔTM fusion proteins (10 μg) immobilized to glutathione beads at 4° C. for 3 h. After incubation, the beads were washed with the lysis buffer for five times, resuspended in NuPAGE® LDS Sample Buffer containing Sample Reducing Agent (Invitrogen), fractioned by 10% NuPAGE® (Invitrogen), and analyzed by western blotting. The antibodies used were: rabbit polyclonal anti-GST (1:3,000; Santa Cruz Biotechnology), rabbit polyclonal anti-HA (1:4,000; Abcam) and mouse monoclonal anti-Flag M2 (1:1,000; Sigma).

[0352] In situ hybridization. A part of the human SWAMP cDNA (GenBank Accession number, NM_{—}153000: nt. 338-1899) was cloned into pCR®II-TOPO vector (Invitrogen). The antisense and sense DIG-labelled cRNA probes were synthesized from the linearized vectors with T7 and SP6 RNA polymerases (Roche Applied Science), respectively. Dissected human hair follicles were fixed with 4% paraformaldehyde-PBS at 4° C. overnight. After dehydration step with 30% sucrose-PBS, the tissues were frozen in OCT compound and sectioned on glass slides at the thickness of 10 μm. In situ hybridization was performed following the methods described previously with minor modifications^{A37}. At the prehybridization steps, the sections were treated with 5 μg/ml Protease K for 15 min at 37° C. Hybridization was performed at 55° C. overnight. In situ hybridizations on chick spinal cord sections were performed as described^{A38}. The antisense mSwamp mRNA was generated using the In vitro transcription kit (Roche, Indianapolis, Ind.) with T7 RNA polymerase. The antisense chick Sim1 mRNA was generated using the T3 RNA polymerase.

[0353] Indirect immunofluorescence (IIF). IIF on cultured cells and fresh frozen sections of individually dissected hair follicles was performed as described previously^{A36}. IIF on HEK293T cells were performed 48 h after the SWAMP expression constructs were transfected. For some stainings, cell membrane was labeled with rhodamine-phalloidin (Invitrogen). The primary antibodies used were mouse polyclonal anti-APCDD1 (diluted 1:1,000; Abnova), rabbit polyclonal anti-SWAMP (1:4,000), rabbit polyclonal anti-pan-cadherin (1:200; Invitrogen), and goat polyclonal anti-calnexin (1:200; Santa Cruz Biotechnology). Immunofluorescence on chick spinal cord sections was performed as described^{A39}. The monoclonal antibodies against Nkx2.2, Pax6, Pax7, En-1 and Evx1 were purchased from DSHB (Iowa); rabbit anti Olig2 (Chemicon, Billerica Mass.), rabbit anti-Sox3, rabbit anti Chx10, and guinea pig anti Isl1/2, sheep anti GFP (Biogenesis) and mouse anti β3-tubulin (Tuj1; Covance) were used as described^{A39}.

[0354] Accession numbers. APCDD1 mRNA NM_{—}153000, protein NP_{—}694545.

### REFERENCES

[0355] A1. Toribio, J. & Quinones, P. A. Hereditary hypotrichosis simplex of the scalp. Evidence for autosomal dominant inheritance. Br. J. Dermatol. 91, 687-696 (1974).
[0356] A2. Baumer, A., Belli, S., Trueb, R. M. & Schinzel, A. An autosomal dominant form of hereditary hypotrichosis simplex maps to 18p11.32-p11.23 in an Italian family. Eur. J. Hum. Genet. 8, 443-448 (2000).
   [0357] A3. Jukkola, T., Sinjushina, N. & Partanen, J. Drapc1 expression during mouse embryonic development. Gene Expr. Patterns 4, 755-762 (2004).
[0358] A4. Trueb, R. M. Molecular mechanisms of androgenetic alopecia. Exp. Gerontol. 37, 981-990 (2002).
[0359] A5. Hillmer, A. M., et al. Genome-wide scan and fine-mapping linkage study of androgenetic alopecia reveals a locus on chromosome 3q26. Am. J. Hum. Genet. 82, 737-743 (2008).
[0360] A6. Hillmer, A. M., et al. Susceptibility variants for male-pattern baldness on chromosome 20p11. Nat. Genet. 40, 1279-1281 (2008).
[0361] A7. Richards, J. B., et al. Male-pattern baldness susceptibility locus at 20p11. Nat. Genet. 40, 1282-1284 (2008).
[0362] A8. Takahashi, M., et al. Isolation of a novel human gene, APCDD1, as a direct target of the beta-Catenin/T-cell factor 4 complex with probable involvement in colorectal carcinogenesis. Cancer Res. 62, 5651-5656 (2002).
[0363] A9. Pidasheva, S., Canaff, L., Simonds, W. F., Marx, S. J. & Hendy, G. N. Impaired cotranslational processing of the calcium-sensing receptor due to signal peptide missense mutations in familial hypocalciuric hypercalcemia. Hum. Mol. Genet. 14, 1679-1690 (2005).
[0364] A10. Fitches, A. C., et al. Impaired cotranslational processing as a mechanism for type I antithrombin deficiency. Blood 92, 4671-4676 (1998).
[0365] A11. O'Shaughnessy, R. F., Yeo, W., Gautier, J., Jahoda, C. A. & Christiano, A. M. The WNT signalling modulator, Wise, is expressed in an interaction-dependent manner during hair-follicle cycling. J. Invest. Dermatol. 123, 613-621 (2004).
[0366] A12. Bazzi, H., Fantauzzo, K. A., Richardson, G. D., Jahoda, C. A. & Christiano, A. M. The Wnt inhibitor, Dickkopf 4, is induced by canonical Wnt signaling during ectodermal appendage morphogenesis. Dev. Biol. 305, 498-507 (2007).
[0367] A13. Kawano, Y. & Kypta, R. Secreted antagonists of the Wnt signalling pathway. J. Cell Sci. 116, 2627-2634 (2003).
[0368] A14. Nakamura, T. & Matsumoto, K. The functions and possible significance of Kremen as the gatekeeper of Wnt signalling in development and pathology. J Cell. Mol. Med. 12, 391-408 (2008).
[0369] A15. Kishimoto, J., Burgeson, R. E. & Morgan, B. A. Wnt signaling maintains the hair-inducing activity of the dermal papilla. Genes Dev. 14, 1181-1185 (2000).
[0370] A16. Megason, S. G. & McMahon, A. P. A mitogen gradient of dorsal midline Wnts organizes growth in the CNS. Development 129, 2087-2098 (2002).
[0371] A17. Lei, Q., et al. Wnt signaling inhibitors regulate the transcriptional response to morphogenetic Shh-Gli signaling in the neural tube. Dev. Cell 11, 325-337 (2006).
[0372] A18. Yu, W., McDonnell, K., Taketo, M. M. & Bai, C. B. Wnt signaling determines ventral spinal cord cell fates in a time-dependent manner. Development 135, 3687-3696 (2008).
[0373] A19. Leyns, L., Bouwmeester, T., Kim, S. H., Piccolo, S. & De Robertis, E. M. Frzb-1 is a secreted antagonist of Wnt signaling expressed in the Spemann organizer. Cell 88, 747-756 (1997).
[0374] A20. Wang, S., Krinks, M., Lin, K., Luyten, F. P. & Moos, M., Jr. Frzb, a secreted protein expressed in the Spemann organizer, binds and inhibits Wnt-8. Cell 88, 757-766 (1997).
[0375] A21. Niehrs, C. Regionally specific induction by the Spemann-Mangold organizer. Nat. Rev. Genet. 5, 425-434 (2004).
[0376] A22. Heasman, J. Patterning the early Xenopus embryo. Development 133, 1205-1217 (2006).
[0377] A23. Brannon, M., Gomperts, M., Sumoy, L., Moon, R. T. & Kimelman, D. A beta-catenin/XTcf-3 complex binds to the siamois promoter to regulate dorsal axis specification in Xenopus. Genes Dev. 11, 2359-2370 (1997).
[0378] A24. Smith, J. C., Price, B. M., Green, J. B., Weigel, D. & Herrmann, B. G. Expression of a Xenopus homolog of Brachyury (T) is an immediate-early response to mesoderm induction. Cell 67, 79-87 (1991).
[0379] A25. Kadowaki, T., Wilder, E., Klingensmith, J., Zachary, K. & Perrimon, N. The segment polarity gene porcupine encodes a putative multitransmembrane protein involved in Wingless processing. Genes Dev. 10, 3116-3128 (1996).
[0380] A26. Hoppler, S., Brown, J. D. & Moon, R. T. Expression of a dominant-negative Wnt blocks induction of MyoD in Xenopus embryos. Genes Dev. 10, 2805-2817 (1996).
[0381] A27. Gat, U., DasGupta, R., Degenstein, L. & Fuchs, E. De Novo hair follicle morphogenesis and hair tumors in mice expressing a truncated beta-catenin in skin. Cell 95, 605-614 (1998).
[0382] A28. Liu, H., et al. Augmented Wnt signaling in a mammalian model of accelerated aging. Science 317, 803-806 (2007).
[0383] A29. Andl, T., Reddy, S. T., Gaddapara, T. & Millar, S. E. WNT signals are required for the initiation of hair follicle development. Dev. Cell 2, 643-653 (2002).
[0384] A30. Martinez-Mir, A., et al. Genomewide scan for linkage reveals evidence of several susceptibility loci for alopecia greata. Am. J. Hum. Genet. 80, 316-328 (2007).
[0385] A31. Pasternack, S. M., et al. G protein-coupled receptor P2Y5 and its ligand LPA are involved in maintenance of human hair growth. Nat. Genet. 40, 329-334 (2008).
[0386] A32. Konigshoff, M., et al. Functional Wnt signaling is increased in idiopathic pulmonary fibrosis. PLoS ONE 3, e2142 (2008).
[0387] A33. Noguchi, K., Ishii, S. & Shimizu, T. Identification of p2y9/GPR23 as a novel G protein-coupled receptor for lysophosphatidic acid, structurally distant from the Edg family. J. Biol. Chem. 278, 25600-25606 (2003).
[0388] A34. Niwa, H., Yamamura, K. & Miyazaki, J. Efficient selection for high-expression transfectants with a novel eukaryotic vector. Gene 108, 193-199 (1991).
[0389] A35. Briscoe, J., Pierani, A., Jessell, T. M. & Ericson, J. A homeodomain protein code specifies progenitor cell identity and neuronal fate in the ventral neural tube. Cell 101, 435-445 (2000).
[0390] A36. Bazzi, H., et al. Desmoglein 4 is expressed in highly differentiated keratinocytes and trichocytes in human epidermis and hair follicle. Differentiation 74, 129-140 (2006).
[0391] A37. Aoki, N., et al. A novel type II cytokeratin, mK6irs, is expressed in the Huxley and Henle layers of the mouse inner root sheath. J. Invest. Dermatol. 116, 359-365 (2001).
[0392] A38. Schaeren-Wiemers, N. & Gerfin-Moser, A. A single protocol to detect transcripts of various types and expression levels in neural tissue and cultured cells: in situ hybridization using digoxigenin-labelled cRNA probes. Histochemistry 100, 431-440 (1993).
[0393] A39. Agalliu, D. & Schieren, I. Neural Dev. 4, 2 (2009).
[0394] A40. Nieuwkoop, P. D. & Faber, J. Normal table of Xenopus laevis. North Holland Publishing Co. Amsterdam, The Netherlands (1967).
[0395] A41. Vonica, A. & Gumbiner, B. M. Zygotic Wnt activity is required for Brachyury expression in the early Xenopus laevis embryo. Dev. Biol. 250, 112-127 (2002).
[0396] A42. Taylor, M. F., Paulauskis, J. D., Weller, D. D. & Kobzik, L. In vitro efficacy of morpholino-modified antisense oligomers directed against tumor necrosis factor-alpha mRNA. J. Biol. Chem. 271, 17445-17452 (1996).
[0397] A43. Wilson, P. A. & Melton, D. A. Mesodermal patterning by an inducer gradient depends on secondary cell-cell communication. Curr. Biol. 4, 676-686 (1994).

### Example 3

### Clinical Features of Pakistani Families with HHS

[0398] We identified two Pakistani families, HHS1 and HHS2, with typical clinical features with Hereditary hypotrichosis simplex (HHS) (FIG. 1A-F, FIG. 5, FIG. 1H, bottom panel of FIG. 2B, and FIG. 6). The pedigrees of both families show clear autosomal dominant inheritance (FIG. 1H, bottom panel of FIG. 2B, and FIG. 6). All affected individuals had normal scalp hair density at birth, and the hair loss gradually progressed with age, beginning around 2-5 years old (FIG. 1A-F, FIG. 5, FIG. 1H, bottom panel of FIG. 2B, and FIG. 6). The hair grows slowly and stops growing after a few inches. Some affected individuals show light-colored or hypopigmented hair shafts (FIG. 1A, 1C and FIG. 5A). In most cases, body hairs and sexual hairs are also sparse (FIG. 5F). Eyebrows, eyelashes, and beard hairs are not affected. Under light microscopy, the bulb portion of the plucked hair shows dystrophic features (FIG. 5G) and is miniaturized (FIG. 5H). The hair shaft is thin and without any characteristic anomalies, and the distal ends appear tapered (FIG. 5I). Affected individuals in both families show normal teeth, nails, and sweating, and do not show keratosis pilaris. There was no familial history of either neurologic abnormalities or a high prevalence of cancers. We initially excluded the CDSN and HR genes from both families by linkage analysis.

### REFERENCES

[0399] S1. Schmidt-Ullrich, R. & Paus, R. Molecular principles of hair follicle induction and morphogenesis. Bioessays 27, 247-261 (2005).
[0400] S2. Sprecher, E., et al. Hypotrichosis with juvenile macular dystrophy is caused by a mutation in CDH3, encoding P-cadherin. Nat Genet 29, 134-136 (2001).
[0401] S3. Shimomura, Y., et al., P-cadherin is a p63 target gene with a crucial role in the developing human limb bud and hair follicle. Development 135, 743-753 (2008).
[0402] S4. Kjaer, K. W., et al. Distinct CDH3 mutations cause ectodermal dysplasia, ectrodactyly, macular dystrophy (EEM syndrome). J Med Genet 42, 292-298 (2005).
[0403] S5. Wen, Y., et al. Loss-of-function mutations of an inhibitory upstream ORF in the human hairless transcript cause Marie Unna hereditary hypotrichosis. Nat Genet 41, 228-233 (2009).
[0404] S6. Winter, H., et al. Mutations in the hair cortex keratin hHb6 cause the inherited hair disease monilethrix. Nat Genet 16, 372-374 (1997).
[0405] S7. van Steensel, M. A., Steijlen, P. M., Bladergroen, R. S., Vermeer, M. & van Geel, M. A missense mutation in the type II hair keratin hHb3 is associated with monilethrix. J Med Genet 42, e19 (2005).
[0406] S8. Kljuic, A., et al. Desmoglein 4 in hair follicle differentiation and epidermal adhesion. Cell 113, 249-260 (2003).
[0407] S9. Schaffer, J. V., et al. Mutations in the desmoglein 4 gene underlie localized autosomal recessive hypotrichosis with monilethrix hairs and congenital scalp erosions. J Invest Dermatol 126, 1286-1291 (2006).
[0408] S10. Shimomura, Y., Sakamoto, F., Kariya, N., Matsunaga, K. & Ito, M. Mutations in the desmoglein 4 gene are associated with monilethrix-like congenital hypotrichosis. J Invest Dermatol 126, 1281-1285 (2006).
[0409] S11. Zlotogorski, A., et al. An autosomal recessive form of monilethrix is caused by mutations in DSG4: clinical overlap with localized autosomal recessive hypotrichosis. J Invest Dermatol 126, 1292-1296 (2006).
[0410] S12. Toribio, J. & Quinones, P. A. Hereditary hypotrichosis simplex of the scalp. Evidence for autosomal dominant inheritance. Br J Dermatol 91, 687-696 (1974).
[0411] S13. Bentley-Phillips, B. & Grace, H. J. Hereditary hypotrichosis. A previously undescribed syndrome. Br J Dermatol 101, 331-339 (1979).
[0412] S14. Ibsen, H. H., et al. Acta Derm Venereol 71, 349-351 (1991).
[0413] S15. Levy-Nissenbaum, E., et al. Hypotrichosis simplex of the scalp is associated with nonsense mutations in CDSN encoding corneodesmosin. Nat Genet 34, 151-153 (2003).
[0414] S16. Baumer, A., Belli, S., Trueb, R. M. & Schinzel, A. An autosomal dominant form of hereditary hypotrichosis simplex maps to 18p11.32-p11.23 in an Italian family. Eur J Hum Genet 8, 443-448 (2000).
[0415] S17. Pasternack, S. M., et al. G protein-coupled receptor P2Y5 and its ligand LPA are involved in maintenance of human hair growth. Nat Genet 40, 329-334 (2008).
[0416] S18. Shimomura, Y., et al. Disruption of P2RY5, an orphan G protein-coupled receptor, underlies autosomal recessive woolly hair. Nat Genet 40, 335-339 (2008).
[0417] S19. Kao, K. R. & Elison, R. P. The entire mesodermal mantle behaves as Spemann's organizer in dorsoanterior enhanced Xenopus laevis embryos. Dev Biol 127, 64-77 (1988).

### Example 4

### APCDD1 Target Genes and Interaction Partners

[0418] APCDD1 is a conserved gene, not only in vertebrates but in all Deuterostomes, from sea urchin to man. As described herein, we have showed that APCDD1 acts as a Wnt inhibitor, and directly interacted with a Wnt ligand and a coreceptor. We decided to take advantage of the conserved nature of APCDD1 to use experiments in Xenopus to identify genes regulated by APCDD1 relevant for human pathology.

[0419] To identify genes regulated by APCDD1(“A1”) in early Xenopus development, we decided to deplete A1 protein on the dorsal side of pre-blastula Xenopus embryos. Antisense morpholino oligonucleotides (MO) (GeneTools; Philomath, Oreg.) were injected in the two dorsal blastomeres of 4 cell stage embryos (30 ng/injection). Control and depleted embryos were allowed to develop to stage 10.5, when the dorsal side can be easily recognized because of the presence of the dorsal lip (equivalent of the node and anterior primitive streak in amniotes). Dorsal fragments were then isolated by cutting them with a gastromaster (XenoTech; Lenexa, Kans.) and processed for RNA purification using a proteinase K buffer, Trizol reagent and RNA purification kit (Qiagen; Germantown, Md.). cRNA was produced with Affymetrix labeling kit and hybridized to Affymetrix Xenopus Laevis 2.0 arrays (Rockefeller genomic facility). Results were analyzed with the Genespring program, with a detection threshold of 20, and a minimal variation of 2 fold. Three arrays, hybridized with probes derived from different embryos, were used for both control and depleted samples. Identified genes are shown below in Table 6. The validity of microarray results was tested by qPCR on cDNA obtained from a different experiment on an ABI real-time PCR machine.

TABLE 6
Genes Increased by APCDD1 MO vs. control (dorsal side of embryos only)

| | Fold | |
|---|---|---|
| Gene | Increase | Description |
| angiotensin receptor- | 16 | Required for cardiovascular development in Xenopus (Inui |
| related protein 1b | | Dev Biol. 2006 Oct. 1; 298(1): 188-200; and D B Cox et al., |
| (apelin receptor, agrtl | | Dev Biol. 2006 Aug. 1; 296(1): 177-89) |
| 1b) | | Required for heart field formation in zebrafish (Solnica- |
| | | Krezel Dev Cell. 2007 March; 12(3): 391-402, Stainier Dev |
| | | Cell. 2007 March; 12(3): 403-13). |
| | | Apelin 13 (ligand) might be working through NF-kβ |
| | | transcription in regulating vascular tension. |
| foxi1-ema/ | 13.3 | This gene is normally expressed on the VENTRAL side of |
| Xema/Foxi1/HNF-3 | | the embryo. It is absent in the controls because only the |
| | | dorsal side was analyzed. (Wessely De Rob organizer |
| | | genes). |
| | | It is implicated in negative regulation of endodermal cell |
| | | fate specification |
| | | Positive regulation of transcription, DNA-binding factor |
| | | Negative regulation of mesodermal cell fate determination |
| | | (Suri et al. Development 2005 132: 2733-2742) |
| | | Closest homology to Foxi1/HNF-3 isoform-a in humans. |
| | | HNF-3 cooperates with NF-kβ to activate CRP (C-reactive |
| | | protein) |
| histone 3r | 10.6 | Expressed in the neurula and tadpole stages, possibly |
| | | ectoderm or neural MOD (Pollet Mech Dev. 2005 |
| | | March; 122(3): 365-439). |
| polo-like kinase 2 | 8.9 | Involved in growth. |
| (plk2) | | Also called serum-inducible kinase(SNK)/polo-like kinase |
| | | 2 PKC-like superfamily |
| | | Inhibited by drugs in multiple myeloma treatment |
| | | Plk1 cooperates with Dsh for mitotic progression; Plk2 is |
| | | an activity-inducible kinase that homeostatically decreases |
| | | excitatory synapse number and strength. (EMBO J. 2010 |
| | | Oct. 20; 29(20): 3470-83) |
| | | Phosphorylates centrosomal P4.1-associated protein |
| | | (CPAP), required for cell cycle progression through |
| | | phosphorylation of NPM/B23 (Nucleophosmin) which |
| | | leads to centriole duplication. It is a p53 target (EMBO J. |
| | | 2010 Jul. 21; 29(14): 2395-406) |
| | | Required for NGF-induced neuronal differentiation. The |
| | | gene is silenced in B-cell malignancies. (J Biol Chem. |
| | | 2009 Nov. 13; 284(46): 32053-65) |
| | | Knock-out of gene: retarded growth, slow growth of |
| | | primary fibroblasts (Mol Cell Biol. 2003 October; 23(19): |
| | | 6936-43) |
| | | Expressed in G1 hypocampal cells. |
| | | In XENOPUS, the gene is called Plx2 (Exp Cell Res. 2001 |
| | | Oct. 15; 270(1): 78-87). It accelerates progesterone-induced |
| | | oocyte maturation when overexpressed. |
| | | Present in notochord at stage 13, not detected situ before |
| | | stage 10.5. |
| cyclin G1 (ccng1) | 6.2 | Involved in Growth |
| | | cyclin G1 is repressed by p53, and increases in p53 Knock- |
| | | Out together with p21 |
| PARP3 - poly (ADP- | 4.8 | Role in ectodermal specification and neural crest |
| ribose) polymerase | | development (PLoS One. 2011 Jan. 17; 6(1): e15834). |
| family, member 3 | | Expression is shown to overlap APCDD1. |
| | | Involved in DNA repair with (ADP-ribose)-binding protein |
| | | APLF (Rulten Mol Cell. 2011 Jan. 7; 41(1): 33-45) |
| haeme peroxidase | 4.15 | |
| E3 ubiquitin-protein | 4 | Has been described in a screen for dorsal genes. |
| ligase, Ring finger | | Expressed in anterior endomesoderm. |
| | | In Arabidopsis, a Ring finger ubiquitination protein targets |
| | | Histone 2b |
| ras-like 11b (rasl11b) | 3.46 | Nodal-independent rescue of oep-dep endodermal and |
| | | prechordal plate defects of zygotic oep(−/−) mutants (Zoep). |
| | | No effect on Smad2 phosphorylation (PLoS One. 2008 Jan. |
| | | 16; 3(1): e1434) |
| | | Expressed in organizer and ventral ectoderm, tail tip (like |
| | | APCDD1), the spinal cord (sc), and in several head |
| | | structures such as the hindbrain (hb), the isthmic organizer |
| | | (i), and the otic vesicle (ov). This is a similar expression |
| | | pattern as seen for APCDD1 |
| | | oncogenic activation of ras also activates NF-kβ through |
| | | nonconventional Ikβ kinases |
| Histone 2B | 3.18 | Monoubiquitinated in active genes |
| 5′-nucleotidase, | 3 | |
| cytosolic III (cytosolic | | |
| 5′-nucleotidase III) | | |
| angiotensin receptor- | 2.8 | Decreased in retina of norrin (Wnt receptor) Knock-Out |
| related protein 1 | | mouse (Schafer, Invest Ophthalmol Vis Sci. 2009 |
| (agtrl1, XAngio1 in | | February; 50(2): 906-16. Epub 2008 Oct. 31) |
| Xenopus) | | |
| RAB40B | 2.48 | small GTPase mediated signal transduction. |
| | | May be a substrate-recognition component of a SCF-like |
| | | ECS (Elongin-Cullin-SOCS-box protein) E3 ubiquitin |
| | | ligase complex |
| Histone 2 | 2.45 | |
| FGF receptor 2 | 2.4 | Binds FGF3 (J Biol Chem. 1995 Mar. 24; 270(12): 6779- |
| | | 87.) |
| | | Mutated (activating mutation) in Cruzon syndrome (early |
| | | cranial synostosis) and Apert syndrome (skeletal, neural, |
| | | visceral anomalies). Accelerates cartilage maturation to |
| | | bone. Required for renal development |
| | | PTEN (inhibitor of PI3K) Knock-Out phenotype in bone is |
| | | partially rescued by FGFR2 Knock-Out because its effect |
| | | is due to increased FGF signaling (Dev. 2011 |
| | | April; 138(7): 1433-44.) |
| | | Knock-Out lacks epiblast and basal membrane of visceral |
| | | endoderm |
| | | Expressed in trophectoderm mouse |
| | | requires RAB14 for membrane localization through |
| | | endosomal transport (Dev Cell Volume 20, Issue 1, 18 |
| | | Jan. 2011, Pages 60-71) |
| | | inhibited by miR-125b, which is decreased psoriasis. |
| | | FGFR2 is increased, with incr. proliferation. |
| | | FGFR2(IIb) in keratinocytes; binds KGF; inhibitory for |
| | | hair follicle formation in skin (Dev. 2009 |
| | | July; 136(13): 2153-64. Epub 2009 May 27). |

### EQUIVALENTS

[0420] Those skilled in the art will recognize, or be able to ascertain, using no more than routine experimentation, numerous equivalents to the specific substances and procedures described herein. Such equivalents are considered to be within the scope of this invention, and are covered by the following claims.

What is claimed:

1. A method for controlling hair growth in a subject, the method comprising:
a) administering to the subject an effective amount of an APCDD1 modulating compound,
thereby controlling hair growth in the subject.

2. The method of claim 1, wherein controlling hair growth comprises an induction of hair growth in the subject or a promotion of hair loss in the subject.

3. A method for controlling loss of hair pigmentation in a subject, the method comprising:
a) administering to the subject an effective amount of an APCDD1 modulating compound,
thereby controlling hair pigmentation in the subject.

4. The method of claim 1 or 3, wherein the compound comprises an antibody that specifically binds to an APCDD1 protein or a fragment thereof; an antisense RNA or antisense DNA that inhibits expression of an APCDD1 polypeptide; a siRNA that specifically targets an APCDD1 gene; or a combination thereof.

5. The method of claim 1 or 3, wherein the compound comprises a peptide comprising at least about 10 amino acids of SEQ ID NO: 1 or a vector comprising a nucleic acid sequence encoding a polypeptide comprising SEQ ID NO: 1.

6. The method of claim 1 or 3, wherein the subject is a human, a primate, a feline, a canine, or an equine.

7. The method of claim 1 or 3, wherein the subject is afflicted with hypotrichosis.

8. The method of claim 1 or 3, wherein the subject is afflicted with a hair-loss disorder.

9. The method of claim 8, wherein the hair-loss disorder comprises androgenetic alopecia, Telogen effluvium, Alopecia greata, telogen effluvium, Tinea capitis, alopecia totalis, hypotrichosis, hereditary hypotrichosis simplex, or alopecia universalis.

10. The method of claim 1 or 3, wherein the subject is afflicted with hypertrichosis.

11. The method of claim 1 or 3, wherein administering comprises dispersing the APCDD1 modulating compound to a subject via subcutaneous, intradermal, intramuscular, intra-peritoneal, or intravenous injection; infusion; oral, nasal, or topical delivery; or a combination thereof.

12. The method of claim 1 or 3, wherein administering comprises dispersing the APCDD1 modulating compound to an epithelial cell derived from a hair follicle or skin.

13. A composition for modulating APCDD1 protein expression or activity in a subject in need thereof, wherein the composition comprises an siRNA that specifically targets an APCDD1 gene.

14. The composition of claim 13, wherein the siRNA comprises a nucleic acid sequence comprising any one sequence of SEQ ID NO: 112-3776.

15. The composition of claim 13, wherein APCDD1 protein expression is decreased by at least about 40%, at least about 45%, at least about 50%, at least about 55%, at least about 60%, at least about 65%, at least about 70%, at least about 75%, at least about 80%, at least about 90%, at least about 95%, at least about 99%, or 100%.

16. A composition for controlling hair growth or loss of hair pigmentation in a subject, the composition in an admixture of a pharmaceutically acceptable carrier comprising an APCDD1 modulating compound.

17. The composition of claim 16, wherein the pharmaceutically acceptable carrier comprises water, a glycol, an ester, an alcohol, a lipid, or a combination thereof.

18. The composition of claim 16, wherein controlling hair growth comprises an induction of hair growth in the subject or a promotion of hair loss in the subject.

19. The composition of claim 16, wherein the compound comprises an antibody that specifically binds to an APCDD1 protein or a fragment thereof; an antisense RNA or antisense DNA that inhibits expression of an APCDD1 polypeptide; a siRNA that specifically targets an APCDD1 gene; or a combination thereof.

20. The composition of claim 16, wherein the compound comprises a peptide comprising at least about 10 amino acids of SEQ ID NO: 1 or a vector comprising a nucleic acid sequence encoding a polypeptide comprising SEQ ID NO: 1.

21. The composition of claim 13 or 16, wherein the subject is a human, a primate, a feline, a canine, or an equine.

22. The composition of claim 13 or 16, wherein the subject is afflicted with hypotrichosis.

23. The composition of claim 13 or 16, wherein the subject is afflicted with a hair-loss disorder.

24. The composition of claim 23, wherein the hair-loss disorder comprises androgenetic alopecia, Alopecia greata, telogen effluvium, hypotrichosis, alopecia totalis, or alopecia universalis.

25. The composition of claim 13 or 16, wherein the subject is afflicted with hypertrichosis.

26. A kit for controlling hair growth, the kit comprising a container having the composition of claim 16 disposed therein and instructions for use.

27. A method for identifying a compound that modulates APCDD1 protein activity, the method comprising:
a) expressing APCDD1 protein in a cell;
b) contacting a cell with a ligand source for an effective period of time;
c) measuring a secondary messenger response, wherein the response is indicative of a ligand binding to APCDD1 protein;
d) isolating the ligand from the ligand source; and
e) identifying the structure of the ligand that binds APCDD1 protein,
thereby identifying which compound would modulate the activity of APCDD1 protein.

28. The method of claim 27, further comprising:
f) obtaining or synthesizing the compound determined to bind to APCDD1 protein or to modulate APCDD1 protein activity;
g) contacting APCDD1 protein with the compound under a condition suitable for binding; and
h) determining whether the compound modulates APCDD1 protein activity using a diagnostic assay.

29. The method of claim 27, wherein the compound is a APCDD1 agonist or a APCDD1 antagonist.

30. The method of claim 29, wherein the antagonist decreases APCDD1 protein or RNA expression or APCDD1 activity by at least about 10%, at least about 20%, at least about 30%, at least about 40%, at least about 50%, at least about 60%, at least about 70%, at least about 75%, at least about 80%, at least about 90%, at least about 95%, or at least about 99%.

31. The method of claim 29, wherein the antagonist decreases APCDD1 protein or RNA expression or APCDD1 activity by 100%.

32. The method of claim 29, wherein the agonist increases APCDD1 protein or RNA expression or APCDD1 activity by at least about 10%, at least about 20%, at least about 30%, at least about 40%, at least about 50%, at least about 60%, at least about 70%, at least about 75%, at least about 80%, at least about 90%, at least about 95%, or at least about 99%.

33. The method of claim 29, wherein the agonist increases APCDD1 protein or RNA expression or APCDD1 activity by 100%.

34. The method of claim 29, wherein the compound comprises an antibody that specifically binds to an APCDD1 protein or a fragment thereof; an antisense RNA or antisense DNA that inhibits expression of an APCDD1 polypeptide; a siRNA that specifically targets an APCDD1 gene, a peptide comprising at least 10 amino acids of SEQ ID NO:1 wherein the peptide competes with endogenous APCDD1 for ligand binding; or a combination thereof.

35. The method of claim 27, wherein the cell is a bacterium, a yeast, an insect cell, or a mammalian cell.

36. The method of claim 27, wherein the ligand source is a compound library or a tissue extract.

37. The method of claim 27, wherein measuring comprises detecting an increase or decease in a secondary messenger concentration.

38. The method of claim 27, wherein the assay determines the concentration of the secondary messenger within the cell.

39. The method of claim 38, wherein the secondary messenger comprises glycogen synthase kinase 3β (GSK3β), β-catenin, adenomatous polyposis coli (APC), axin, or a combination thereof.

40. The method of claim 28, wherein contacting comprises administering the compound to a mammal in vivo or a cell in vitro.

41. The method of claim 40, wherein the mammal is a mouse.

42. The method of claim 27, wherein the compound increases or decreases downstream signaling of the APCDD1 protein.

43. The method of claim 28, wherein the assay measures an intracellular concentration of glycogen synthase kinase 3β (GSK3β), β-catenin, adenomatous polyposis coli (APC), or axin.

44. The method of claim 28, wherein the assay measures LEF/TCF transcription.

45. The method of claim 28, wherein the assay measures β-catenin phosphorylation or β-catenin nuclear translocation.

46. A method for detecting the presence of or a predisposition to a hair-loss disorder in a human subject, the method comprising:
(a) obtaining a biological sample from a human subject; and
(b) detecting whether or not there is an alteration in the expression of APCDD1 protein in the subject as compared to a subject not afflicted with a hair-loss disorder.

47. The method of claim 46, wherein the detecting comprises detecting whether there is an alteration in the APCDD1 gene locus.

48. The method of claim 47, wherein the alteration comprises a missense mutation.

49. The method of claim 48, wherein the mutation is thymine to guanine substitution at position 26 of SEQ ID NO: 2.

50. The method of claim 46, wherein the detecting comprises detecting whether a small nuclear polymorphism (SNP) is present in the APCDD1 gene locus.

51. The method of claim 50, wherein the SNP comprises a single nucleotide change, or a cluster of SNPs in and around the APCDD1 gene, or other SNPS that are in linkage disequilibrium (LD) with APCDD1.

52. The method of claim 46, wherein the detecting comprises detecting whether at least a portion of the APCDD1 gene is deleted.

53. The method of claim 46, wherein the detecting comprises detecting whether the signal peptide sequence of the APCDD1 protein is altered.

54. The method of claim 46, wherein the detecting comprises detecting whether there is an alteration in the APCDD1 protein.

55. The method of claim 54, wherein the alteration comprises a Leucine to Arginine substitution at amino acid position 9 of SEQ ID NO: 1.

56. The method of claim 46, wherein the detecting comprises detecting whether expression of APCDD1 is reduced.

57. The method of claim 46, wherein the detecting comprises detecting in the sample whether there is a reduction in APCDD1 mRNA, APCDD1 protein, or a combination thereof.

58. The method of claim 46, wherein detecting comprises gene sequencing, selective hybridization, amplification, gene expression analysis, or a combination thereof.

59. The method of claim 46, wherein amplification comprises using forward and reverse RT-PCR primers comprising nucleotide sequences of SEQ ID NOS: 9, 10, 13, 14, 57, or 103.

60. The method of claim 46, wherein the subject is a human, a dog, or a mouse.

61. The method of claim 46, wherein the sample comprises blood, serum, sputum, lacrimal secretions, semen, vaginal secretions, fetal tissue, skin tissue, epithelial tissue, muscle tissue, amniotic fluid, or a combination thereof.

62. The method of claim 46, wherein a reduction in APCDD1 expression of at least 20% indicates a predisposition to or presence of a hair-loss disorder in the subject.

63. The method of claim 46, the hair-loss disorder comprises androgenetic alopecia, Alopecia greata, telogen effluvium, alopecia totalis, hypotrichosis, hereditary hypotrichosis simplex, or alopecia universalis.

64. A diagnostic kit for determining whether a sample from a subject exhibits reduced APCDD1 expression or exhibits an APCDD1 gene mutation, the kit comprising nucleic acid primers that specifically hybridize to and are capable of priming a polymerase reaction from APCDD1.

65. The kit of claim 64, wherein the primers comprise a nucleotide sequence of SEQ ID NOS: 9, 10, 13, 14, 21, 22, 23, 24, 25, 67, 68, 69, 70, or 71.

66. The kit of claim 64, wherein the mutation comprises a Leucine to Arginine substitution at amino acid position 9 of SEQ ID NO: 1.

The application's sequence listing, which the Patent Office published only in electronic form, follows.

SEQUENCE LISTING (9773 sequences)

SEQ ID NO: 1 - protein, 514 aa, Homo sapiens
MSWPRRLLLRYLFPALLLHGLGEGSALLHPDSRSHPRSLEKSAWRAFKESQCHHMLKHLHNGARITVQMPPTIEGHWVSTGCEVRSGPEFITRSYRFYHNNTFKAYQFYYGSNRCTNPTYTLIIRGKIRLRQASWIIRGGTEADYQLHNVQVICHTEAVAEKLGQQVNRTCPGFLADGGPWVQDVAYDLWREENGCECTKAVNFAMHELQLIRVEKQYLHHNLDHLVEELFLGDIHTDATQRMFYRPSSYQPPLQNAKNHDHACIACRIIYRSDEHHPPILPPKADLTIGLHGEWVSQRCEVRPEVLFLTRHFIFHDNNNTWEGHYYHYSDPVCKHPTFSIYARGRYSRGVLSSRVMGGTEFVFKVNHMKVTPMDAATASLLNVFNGNECGAEGSWQVGIQQDVTHTNGCVALGIKLPHTEYEIFKMEQDARGRYLLFNGQRPSDGSSPDRPEKRATSYQMPLVQCASSSPRAEDLAEDSGSSLYGRAPGRHTWSLLLAALACLVPLLHWNIRR

SEQ ID NO: 2 - DNA, 2579 bp, Homo sapiens
gaaatatgaagagacgctgcagctgcggtggcggtggcggccactgcagctcagagcggcgcacgcggcggccggggcgggacgcggggccgggcgcggagaagtcggggcgggcggcagagaggccgggacgcggaccgggccggggcgcccacagccgcccgacggcgcccagagagcgcgcgccccgcagccccgcgcctagcccgccgggcatggggcgcgcggcagccgcctgaagccccggcctggcccggccgcacccggccggaggcggagggcagagcgcgcgcccagttgcccgggcaccaaatcggagcgcggcgtgcgggaggccccagagcaggactggaaatgtcctggccgcgccgcctcctgctcagatacctgttcccggccctcctgcttcacgggctgggagagggttctgccctccttcatccagacagcaggtctcatcctaggtccttagagaaaagtgcctggagggcttttaaggagtcacagtgccatcacatgctcaaacatctccacaatggtgcaaggatcacagtgcagatgccacctacaatcgagggccactgggtctccacaggctgtgaagtaaggtcaggcccagagttcatcacaaggtcctacagattctaccacaataacaccttcaaggcctaccaattttattatggcagcaaccggtgcacaaatcccacttatactctcatcatccggggcaagatccgcctccgccaggcctcctggatcatccgagggggcacggaagccgactaccagctgcacaacgtccaggtgatctgccacacagaggcggtggccgagaagctcggccagcaggtgaaccgcacatgcccgggcttcctcgcagacgggggtccctgggtgcaggacgtggcctatgacctctggcgagaggagaacggctgtgagtgcaccaaggccgtgaactttgccatgcatgaacttcagctcatccgggtggagaagcagtaccttcaccacaacctcgaccacctggtcgaggagctcttccttggtgacattcacactgatgccacccagaggatgttctaccggccctccagttaccagccccctctgcagaatgccaagaaccacgaccatgcctgcatcgcctgtcggatcatctatcggtcagacgagcaccaccctcccatcctgcccccaaaggcagacctgaccatcggcctgcacggggagtgggtgagccagcgctgtgaggtgcgccccgaagtcctcttcctcacccgccacttcatcttccatgacaacaacaacacctgggagggccactactaccactactcagacccggtgtgcaagcaccccaccttctccatctacgcccggggccgctacagccgcggcgtcctctcgtccagggtcatgggaggcaccgagttcgtgttcaaagtgaatcacatgaaggtcacccccatggatgcggccacagcctcactgctcaacgtcttcaacgggaatgagtgcggggccgagggctcctggcaggtgggcatccagcaggatgtgacccacaccaatggctgcgtggccctgggcatcaaactacctcacacggagtacgagatcttcaaaatggaacaggatgcccgggggcgctatctgctgttcaacggtcagaggcccagcgacgggtccagcccagacaggccagagaagagagccacgtcctaccagatgcccttggtccagtgtgcctcctcttcgccgagggcagaggacctcgcagaagacagtggaagcagcctgtatggccgggcccctgggaggcacacctggtccctgctgctggctgcacttgcctgccttgtccctctgctgcattggaacatccgcagatagaagttttagaaagttctatttttccaaaccaggattccttactattgacagatttgctttaccaaaagaaaagacatttattcttttgatgcacttgaatgccagagaactgtccttctttttctcctctccctccctcccagcccctgagtcatgaacagcaaggagtgtttgaagtttctgctttgaactccgtccagcctgatccctggcctgagcaacttcacaacagtaattgcactttaagacagcctagagttctggacgagcgtgtttggtagcagggatgaaagctagggcctcttatttttttctcttaattattattatatttctgagttaaacttagaagaaacaactatcaagctacaacttttcctgccattttcctgtggttgcagcctgtcttcctttgaaattgttttactctctgagttttatatgctggaatccaatgcagagttggtttgggactgtgatcaagacaccttttattaataaagaagagacacaggtgtagatatgtatatacaaaaagatgtacggtctggccaaaccaccttcccagcctttatgcaaaaaaaggggagaatcaaagctttcatttcagaaatgttgcgtggaaaagtatctgtaattaaagtttcgaagtaatttaacctaaaaaaaaaaaaaaaaaa

SEQ ID NO: 3 - protein, 514 aa, Mus musculus
MSRVRRLLLGYLFPALLLHGLGEGSALLHPDSRSHPRSLEKSAWRAFKESQCHHMLKHLHNGARITVQMPPTIEGHWVSTGCEVRSGPEFMTRSYRFYNNNTFKAYQFYYGSNRCTNPTYTLIIRGKIRLRQASWIIRGGTEADYQLHGVQVICHTEAVAEQLSRLVNRTCPGFLAPGGPWVQDVAYDLWQEESNHECTKAVNFAMHELQLIRVEKQYPHHSLDHLVEELFLGDIHTDATQRVFYRPSSYQPPLQNAKNHNHACIACRIIFRSDEHHPPILPPKADLTIGLHGEWVSQRCEVRPEVLFLTRHFIFHDNNNTWEGHYYHYSDPVCKHPTFTIYARGRYSRGVLSSKVMGGTEFVFKVNHMKVTPMDAATASLLNVFSGNECGAEGSWQVGIQQDVTHTNGCVALGIKLPHTEYEIFKMEQDTRGRYLLFNGQRPSDGSSPDRPEKRATSYQMPLVQCASSSPRAEELLEDSQGHLYGRAAGRTAGSLLLPAFVSLWTLPHWRILR

SEQ ID NO: 4 - DNA, 2799 bp, Mus musculus
agcggccactgtacctctgagctgtgcacgccgcggccggggcgggcctcgggactggggctgggagccaaggggccggggcgggacgcggagaggctgggctgcggttcggagtcccgcgcggacaggggccggacggcggcgagggagcgcgcgccccgcagtcccgcgctgcgccggccggggatggggcgcgctgctgcctgaggcccggcctggcgggcgcccgccgggggctgcggctgaggagccgagggcgccctgtaccggagtggcccgcgcgcgcgctcggagggggacagagacggactacagcgaggcccggaggagccccgagatgtcccgtgtgcgccgccttctgcttggatacctgttcccagccctcctgttgcatgggctgggagagggctctgccctccttcatccagacagcagatcgcaccctcggtccttagagaaaagcgcctggagggctttcaaggagtcacagtgtcatcacatgctgaagcatctccacaacggtgcgcggatcacagtgcagatgcccccgaccatcgagggccactgggtgtccacaggctgtgaagtaaggtcgggtccggagttcatgacaaggtcttacaggttctacaacaataataccttcaaggcctaccagttttactatggcagcaaccgctgtacaaaccccacctacaccctcatcatccgaggcaagatccggcttcgccaggcgtcctggatcatccgtgggggcaccgaagctgactaccagcttcacggcgtccaagtcatctgccacacagaggcagtcgctgaacagctcagccgactggtgaaccgaacttgcccaggcttcctggctcctggtggtccctgggtacaggacgtagcctatgacctgtggcaggaggagagtaaccacgagtgcaccaaggctgtgaactttgccatgcacgagctgcagctcatccgtgtggagaagcagtatccccaccacagcctggaccacctggtggaggagctcttcctgggcgacatccacacggacgctacccagagggtgttctaccggccgtccagttaccagccgcccctgcagaatgccaagaaccacaaccatgcgtgcatagcctgccgcatcattttccggtcagatgaacaccaccctcccatactgccccccaaggctgacctgaccattggcctccacggggaatgggtgagccagcgctgcgaggtacgccccgaggtcctcttcctcacccgccacttcatcttccacgacaacaacaacacctgggaagggcattactaccactactcagaccctgtctgcaagcaccccacattcaccatctacgctcgaggccgctacagccgcggtgtgctctcatctaaggtcatgggtggcacggagtttgtgttcaaagtgaatcacatgaaggttactcccatggacgcagccacagcctccctcctcaatgtcttcagtgggaatgagtgtggggctgagggctcctggcaggtgggtatccaacaggatgtgacacataccaatggctgcgtggctctgggcatcaaactacctcacacagaatatgagatcttcaaaatggagcaagacacccgaggccgctacctgctgttcaatggccagaggcccagcgatggctccagcccagacagaccagagaagagagccacatcctaccagatgcccttggtccagtgtgcctcttcctcaccaagagctgaagagttgttggaagacagtcaaggtcatctgtatggcagggcagcagggaggacagctgggtccctgttgcttcctgcctttgtcagcctttggactctcccacattggcgcatcctcagatagaagacatttcctgaaccaagactctttaccgtgtatgactttccttcacacagagaaaggacattgattcttttgatgcacttgaatgccttgagacctgccgttgcctctcctctccccacctcttccagcctctgcgccatgagcagtgtgtttgaagtttcagctttgaatgtcttcccgcccgatccgtggcctgagaacttcatagaggtgtgattgcactttatgtctgcagagagctggggcgagtgtgtttaggggtggcagctgccttcttctctctgtcccctgactcctgactgtgtttctgagctgagcttaaaagatacaaatgacaagctgcagctctctctgccattgcttctctttatctctccaaatcccttccacactcgaggttttcgacactggaacccagtgcagcgttggcttgggaccgccatgaagaccccatgtttgcgacaggagagcctgggttggtgttgagtacataagagacgaggcaaggttcagctaagtctttgtcccagccttaatgctaaccaacactttcagaaatgttgagtagagaggtgtccctaaagcttcaatggaacttaaactctgttgacaagcgagtgccggttttcacttgttgagaagagatgtgtgccatatacttggtttggtggctacagagtacagcctgctgcttaaccctcagaggagactgatccagttgggaaattcagagcagctcctgctccaggcagccagaagcagcagtggggggtgggggtggggattccttgtgttaagtgccacacaactgacaaggagatctgtggagtttttctccaagtgaaccaatcccctgtgtcctggctcacactgtggttagggtgggcacatccactctgccatctttaacacac

SEQ ID NO: 5 - protein, 514 aa, Homo sapiens
MSWPRRLLRRYLFPALLLHGLGEGSALLHPDSRSHPRSLEKSAWRAFKESQCHHMLKHLHNGARITVQMPPTIEGHWVSTGCEVRSGPEFITRSYRFYHNNTFKAYQFYYGSNRCTNPTYTLIIRGKIRLRQASWIIRGGTEADYQLHNVQVICHTEAVAEKLGQQVNRTCPGFLADGGPWVQDVAYDLWREENGCECTKAVNFAMHELQLIRVEKQYLHHNLDHLVEELFLGDIHTDATQRMFYRPSSYQPPLQNAKNHDHACIACRIIYRSDEHHPPILPPKADLTIGLHGEWVSQRCEVRPEVLFLTRHFIFHDNNNTWEGHYYHYSDPVCKHPTFSIYARGRYSRGVLSSRVMGGTEFVFKVNHMKVTPMDAATASLLNVFNGNECGAEGSWQVGIQQDVTHTNGCVALGIKLPHTEYEIFKMEQDARGRYLLFNGQRPSDGSSPDRPEKRATSYQMPLVQCASSSPRAEDLAEDSGSSLYGRAPGRHTWSLLLAALACLVPLLHWNIRR

SEQ ID NO: 6 - DNA, 2579 bp, Homo sapiens
gaaatatgaagagacgctgcagctgcggtggcggtggcggccactgcagctcagagcggcgcacgcggcggccggggcgggacgcggggccgggcgcggagaagtcggggcgggcggcagagaggccgggacgcggaccgggccggggcgcccacagccgcccgacggcgcccagagagcgcgcgccccgcagccccgcgcctagcccgccgggcatggggcgcgcggcagccgcctgaagccccggcctggcccggccgcacccggccggaggcggagggcagagcgcgcgcccagttgcccgggcaccaaatcggagcgcggcgtgcgggaggccccagagcaggactggaaatgtcctggccgcgccgcctcctgcgcagatacctgttcccggccctcctgcttcacgggctgggagagggttctgccctccttcatccagacagcaggtctcatcctaggtccttagagaaaagtgcctggagggcttttaaggagtcacagtgccatcacatgctcaaacatctccacaatggtgcaaggatcacagtgcagatgccacctacaatcgagggccactgggtctccacaggctgtgaagtaaggtcaggcccagagttcatcacaaggtcctacagattctaccacaataacaccttcaaggcctaccaattttattatggcagcaaccggtgcacaaatcccacttatactctcatcatccggggcaagatccgcctccgccaggcctcctggatcatccgagggggcacggaagccgactaccagctgcacaacgtccaggtgatctgccacacagaggcggtggccgagaagctcggccagcaggtgaaccgcacatgcccgggcttcctcgcagacgggggtccctgggtgcaggacgtggcctatgacctctggcgagaggagaacggctgtgagtgcaccaaggccgtgaactttgccatgcatgaacttcagctcatccgggtggagaagcagtaccttcaccacaacctcgaccacctggtcgaggagctcttccttggtgacattcacactgatgccacccagaggatgttctaccggccctccagttaccagccccctctgcagaatgccaagaaccacgaccatgcctgcatcgcctgtcggatcatctatcggtcagacgagcaccaccctcccatcctgcccccaaaggcagacctgaccatcggcctgcacggggagtgggtgagccagcgctgtgaggtgcgccccgaagtcctcttcctcacccgccacttcatcttccatgacaacaacaacacctgggagggccactactaccactactcagacccggtgtgcaagcaccccaccttctccatctacgcccggggccgctacagccgcggcgtcctctcgtccagggtcatgggaggcaccgagttcgtgttcaaagtgaatcacatgaaggtcacccccatggatgcggccacagcctcactgctcaacgtcttcaacgggaatgagtgcggggccgagggctcctggcaggtgggcatccagcaggatgtgacccacaccaatggctgcgtggccctgggcatcaaactacctcacacggagtacgagatcttcaaaatggaacaggatgcccgggggcgctatctgctgttcaacggtcagaggcccagcgacgggtccagcccagacaggccagagaagagagccacgtcctaccagatgcccttggtccagtgtgcctcctcttcgccgagggcagaggacctcgcagaagacagtggaagcagcctgtatggccgggcccctgggaggcacacctggtccctgctgctggctgcacttgcctgccttgtccctctgctgcattggaacatccgcagatagaagttttagaaagttctatttttccaaaccaggattccttactattgacagatttgctttaccaaaagaaaagacatttattcttttgatgcacttgaatgccagagaactgtccttctttttctcctctccctccctcccagcccctgagtcatgaacagcaaggagtgtttgaagtttctgctttgaactccgtccagcctgatccctggcctgagcaacttcacaacagtaattgcactttaagacagcctagagttctggacgagcgtgtttggtagcagggatgaaagctagggcctcttatttttttctcttaattattattatatttctgagttaaacttagaagaaacaactatcaagctacaacttttcctgccattttcctgtggttgcagcctgtcttcctttgaaattgttttactctctgagttttatatgctggaatccaatgcagagttggtttgggactgtgatcaagacaccttttattaataaagaagagacacaggtgtagatatgtatatacaaaaagatgtacggtctggccaaaccaccttcccagcctttatgcaaaaaaaggggagaatcaaagctttcatttcagaaatgttgcgtggaaaagtatctgtaattaaagtttcgaagtaatttaacctaaaaaaaaaaaaaaaaaa

SEQ ID NO: 7 - DNA, 20 bp, Artificial Sequence
  Description of Artificial Sequence: Synthetic primer
ccagagcaggactggaaatg

SEQ ID NO: 8 - DNA, 19 bp, Artificial Sequence
  Description of Artificial Sequence: Synthetic primer
cgccaaggggacagtgtag

SEQ ID NO: 9 - DNA, 21 bp, Artificial Sequence
  Description of Artificial Sequence: Synthetic primer
gtctagttagagtgtggccag

SEQ ID NO: 10 - DNA, 20 bp, Artificial Sequence
  Description of Artificial Sequence: Synthetic primer
gatggtcaggtctgcctttg

SEQ ID NO: 11 - DNA, 20 bp, Artificial Sequence
  Description of Artificial Sequence: Synthetic primer
atggacacgctcccctgact

SEQ ID NO: 12 - DNA, 20 bp, Artificial Sequence
  Description of Artificial Sequence: Synthetic primer
gaaaggtgggagcctcagtc

SEQ ID NO: 13 - DNA, 30 bp, Artificial Sequence
  Description of Artificial Sequence: Synthetic primer
aaaactcgagccagagcaggactggaaatg

SEQ ID NO: 14 - DNA, 59 bp, Artificial Sequence
  Description of Artificial Sequence: Synthetic primer
aaaagctagctcaggcgtagtcgggcacgtcgtaggggtatctgcggatgttccaatgc

SEQ ID NO: 15 - DNA, 61 bp, Artificial Sequence
  Description of Artificial Sequence: Synthetic primer
aaaagctagctacagatcctcttcagagatgagtttctgctctctgcggatgttccaatgc

SEQ ID NO: 16 - DNA, 58 bp, Artificial Sequence
  Description of Artificial Sequence: Synthetic primer
aaaactcgagccagagcaggactggaaatgtcctggccgcgccgcctcctgcgcagat

SEQ ID NO: 17 - DNA, 58 bp, Artificial Sequence
  Description of Artificial Sequence: Synthetic primer
aaaactcgagccagagcaggactggaaatgtcctggccgcgccgcctcctggtcagat

SEQ ID NO: 18 - DNA, 24 bp, Artificial Sequence
  Description of Artificial Sequence: Synthetic primer
gcaaatgaatacactaactagcca

SEQ ID NO: 19 - DNA, 23 bp, Artificial Sequence
  Description of Artificial Sequence: Synthetic primer
ccagtgagaccttaaaagcttca

SEQ ID NO: 20 - DNA, 22 bp, Artificial Sequence
  Description of Artificial Sequence: Synthetic primer
ggcttgggtacaataatgagct

SEQ ID NO: 21 - DNA, 20 bp, Artificial Sequence
  Description of Artificial Sequence: Synthetic primer
cgacgcgccctttcaagtct

SEQ ID NO: 22 - DNA, 19 bp, Artificial Sequence
  Description of Artificial Sequence: Synthetic primer
cactgtctgctgcagaggt

SEQ ID NO: 23 - DNA, 23 bp, Artificial Sequence
  Description of Artificial Sequence: Synthetic primer
gaatctctttcccataccttcag

SEQ ID NO: 24 - DNA, 19 bp, Artificial Sequence
  Description of Artificial Sequence: Synthetic primer
cggaagcatgtgtgcactg

SEQ ID NO: 25 - DNA, 21 bp, Artificial Sequence
  Description of Artificial Sequence: Synthetic primer
gtctagttagagtgtggccag

SEQ ID NO: 26 - DNA, 21 bp, Artificial Sequence
  Description of Artificial Sequence: Synthetic primer
caaagcaggagtgttgaagca

SEQ ID NO: 27 - DNA, 22 bp, Artificial Sequence
  Description of Artificial Sequence: Synthetic primer
gagggaaaaccaactgtaacgt

SEQ ID NO: 28 - DNA, 22 bp, Artificial Sequence
  Description of Artificial Sequence: Synthetic primer
cagacttcattcgtgatctcga

SEQ ID NO: 29 - DNA, 19 bp, Artificial Sequence
  Description of Artificial Sequence: Synthetic primer
agcctggcctcgtcctaga

SEQ ID NO: 30 - DNA, 22 bp, Artificial Sequence
  Description of Artificial Sequence: Synthetic primer
gaaaggcagtgttagtagccat

SEQ ID NO: 31 - DNA, 22 bp, Artificial Sequence
  Description of Artificial Sequence: Synthetic primer
gtttaaggcaaatcccagactt

SEQ ID NO: 32 - DNA, 20 bp, Artificial Sequence
  Description of Artificial Sequence: Synthetic primer
gtcccgtgaggtgaaactta

SEQ ID NO: 33 - DNA, 23 bp, Artificial Sequence
  Description of Artificial Sequence: Synthetic primer
cagtcattcccaatatcatgcag

SEQ ID NO: 34 - DNA, 22 bp, Artificial Sequence
  Description of Artificial Sequence: Synthetic primer
atctgactgctgacatgtactg

SEQ ID NO: 35 - DNA, 23 bp, Artificial Sequence
  Description of Artificial Sequence: Synthetic primer
cactaatctactttccgtcccta

SEQ ID NO: 36 - DNA, 19 bp, Artificial Sequence
  Description of Artificial Sequence: Synthetic primer
tgtcgcgctgcaccagctt

SEQ ID NO: 37 - DNA, 22 bp, Artificial Sequence
  Description of Artificial Sequence: Synthetic primer
gacctagaaggtcattacaagc

SEQ ID NO: 38 - DNA, 23 bp, Artificial Sequence
  Description of Artificial Sequence: Synthetic primer
ctgatttgttgccagtagtcaac

SEQ ID NO: 39 - DNA, 20 bp, Artificial Sequence
  Description of Artificial Sequence: Synthetic primer
tggaaccaactgggtcagtg

SEQ ID NO: 40 - DNA, 22 bp, Artificial Sequence
  Description of Artificial Sequence: Synthetic primer
tatgttgtgcatgagcccattg

SEQ ID NO: 41 - DNA, 20 bp, Artificial Sequence
  Description of Artificial Sequence: Synthetic primer
ctgcacatgtgtcccagaac

SEQ ID NO: 42 - DNA, 22 bp, Artificial Sequence
  Description of Artificial Sequence: Synthetic primer
aagtacatttcacaggggacct

SEQ ID NO: 43 - DNA, 22 bp, Artificial Sequence
  Description of Artificial Sequence: Synthetic primer
tcccgtggaagttactatagca

SEQ ID NO: 44 - DNA, 20 bp, Artificial Sequence
  Description of Artificial Sequence: Synthetic primer
ccaccatggtcatgaggcat

SEQ ID NO: 45 - DNA, 20 bp, Artificial Sequence
  Description of Artificial Sequence: Synthetic primer
gctccaccacccatcttatg

SEQ ID NO: 46 - DNA, 20 bp, Artificial Sequence
  Description of Artificial Sequence: Synthetic primer
gaaggtgggacctgactgga

SEQ ID NO: 47 - DNA, 24 bp, Artificial Sequence
  Description of Artificial Sequence: Synthetic primer
gttggaatgatgaaggggaaattc

SEQ ID NO: 48 - DNA, 22 bp, Artificial Sequence
  Description of Artificial Sequence: Synthetic primer
cagttaaggaactgcttgagct

SEQ ID NO: 49 - DNA, 20 bp, Artificial Sequence
  Description of Artificial Sequence: Synthetic primer
ctcaggatgcagagaagagc

SEQ ID NO: 50 - DNA, 22 bp, Artificial Sequence
  Description of Artificial Sequence: Synthetic primer
agtgcaatggaacactcaagac

SEQ ID NO: 51 - DNA, 20 bp, Artificial Sequence
  Description of Artificial Sequence: Synthetic primer
tgaccgttgtggacccaatg

SEQ ID NO: 52 - DNA, 24 bp, Artificial Sequence
  Description of Artificial Sequence: Synthetic primer
gagagttttgactgtaataggaac

SEQ ID NO: 53 - DNA, 24 bp, Artificial Sequence
  Description of Artificial Sequence: Synthetic primer
ttagtaaccagattttgccatctg

SEQ ID NO: 54 - DNA, 24 bp, Artificial Sequence
  Description of Artificial Sequence: Synthetic primer
cttctacagaatttgagggaaagt

SEQ ID NO: 55 - DNA, 20 bp, Artificial Sequence
  Description of Artificial Sequence: Synthetic primer
ccacctcaggatagttccag

SEQ ID NO: 56 - DNA, 20 bp, Artificial Sequence
  Description of Artificial Sequence: Synthetic primer
ctgggcgttagcaagtgatc

SEQ ID NO: 57 - DNA, 20 bp, Artificial Sequence
  Description of Artificial Sequence: Synthetic primer
atgccacccagaggatgttc

SEQ ID NO: 58 - DNA, 20 bp, Artificial Sequence
  Description of Artificial Sequence: Synthetic primer
gggttttggtggtggctttg

SEQ ID NO: 59 - DNA, 22 bp, Artificial Sequence
  Description of Artificial Sequence: Synthetic primer
cacagcccaagatagttaagtg

SEQ ID NO: 60 - DNA, 19 bp, Artificial Sequence
  Description of Artificial Sequence: Synthetic primer
gtggaggagctgtacctgg

SEQ ID NO: 61 - DNA, 20 bp, Artificial Sequence
  Description of Artificial Sequence: Synthetic primer
ggctgtgtcctcattgccaa

SEQ ID NO: 62 - DNA, 19 bp, Artificial Sequence
  Description of Artificial Sequence: Synthetic primer
ccgaccgaatgcagaagga

SEQ ID NO: 63 - DNA, 20 bp, Artificial Sequence
  Description of Artificial Sequence: Synthetic primer
aggacctcgcagaagacagt

SEQ ID NO: 64 - DNA, 21 bp, Artificial Sequence
  Description of Artificial Sequence: Synthetic primer
caccaggcctaggctaaaatg

SEQ ID NO: 65 - DNA, 23 bp, Artificial Sequence
  Description of Artificial Sequence: Synthetic primer
ttgctatactttaggagccagaa

SEQ ID NO: 66 - DNA, 20 bp, Artificial Sequence
  Description of Artificial Sequence: Synthetic primer
cagagcttcctgcacttcac

SEQ ID NO: 67 - DNA, 19 bp, Artificial Sequence
  Description of Artificial Sequence: Synthetic primer
cgccaaggggacagtgtag

SEQ ID NO: 68 - DNA, 20 bp, Artificial Sequence
  Description of Artificial Sequence: Synthetic primer
ggtcttccatagtggtgtgc

SEQ ID NO: 69 - DNA, 22 bp, Artificial Sequence
  Description of Artificial Sequence: Synthetic primer
tggcaagcctttaagaaggatc

SEQ ID NO: 70 - DNA, 20 bp, Artificial Sequence
  Description of Artificial Sequence: Synthetic primer
aagaggtcctttccctcagc

SEQ ID NO: 71 - DNA, 22 bp, Artificial Sequence
  Description of Artificial Sequence: Synthetic primer
ttctctggcattcaagtgcatc

SEQ ID NO: 72 - DNA, 22 bp, Artificial Sequence
  Description of Artificial Sequence: Synthetic primer
tgtgctcactcttctcaaagtg

SEQ ID NO: 73 - DNA, 23 bp, Artificial Sequence
  Description of Artificial Sequence: Synthetic primer
ctacaactttcccttcttggttc

SEQ ID NO: 74 - DNA, 23 bp, Artificial Sequence
  Description of Artificial Sequence: Synthetic primer
tacaagcagtgccatttggacat

SEQ ID NO: 75 - DNA, 20 bp, Artificial Sequence
  Description of Artificial Sequence: Synthetic primer
aaagcagccgggaaagggaa

SEQ ID NO: 76 - DNA, 20 bp, Artificial Sequence
  Description of Artificial Sequence: Synthetic primer
tatttccctccctccagatg

SEQ ID NO: 77 - DNA, 22 bp, Artificial Sequence
  Description of Artificial Sequence: Synthetic primer
actgctaaacaacacccacagt

SEQ ID NO: 78 - DNA, 20 bp, Artificial Sequence
  Description of Artificial Sequence: Synthetic primer
ggaactgagagctcaacagc

SEQ ID NO: 79 - DNA, 23 bp, Artificial Sequence
  Description of Artificial Sequence: Synthetic primer
cacaataccacttatctgctagg

SEQ ID NO: 80 - DNA, 23 bp, Artificial Sequence
  Description of Artificial Sequence: Synthetic primer
tggcctaataacactcacatgtc

SEQ ID NO: 81 - DNA, 20 bp, Artificial Sequence
  Description of Artificial Sequence: Synthetic primer
cgtgggccatactaccaatg

SEQ ID NO: 82 - DNA, 19 bp, Artificial Sequence
  Description of Artificial Sequence: Synthetic primer
ggagtgtgacccagaggac

SEQ ID NO: 83 - DNA, 26 bp, Artificial Sequence
  Description of Artificial Sequence: Synthetic primer
gccttatagaaagcatatgagtaagt

SEQ ID NO: 84 - DNA, 20 bp, Artificial Sequence
  Description of Artificial Sequence: Synthetic primer
gcgaaccagtgtggacctta

SEQ ID NO: 85 - DNA, 24 bp, Artificial Sequence
  Description of Artificial Sequence: Synthetic primer
ttacagttaggagtaagtcttggt

SEQ ID NO: 86 - DNA, 22 bp, Artificial Sequence
  Description of Artificial Sequence: Synthetic primer
cttgccttacagtaaggaagct

SEQ ID NO: 87 - DNA, 22 bp, Artificial Sequence
  Description of Artificial Sequence: Synthetic primer
tggtgtgtctacagcttatacc

SEQ ID NO: 88 - DNA, 22 bp, Artificial Sequence
  Description of Artificial Sequence: Synthetic primer
aagctgtagtgggcttactcta

SEQ ID NO: 89 - DNA, 23 bp, Artificial Sequence
  Description of Artificial Sequence: Synthetic primer
ggtgaaattcaatgcaagtggtc

SEQ ID NO: 90 - DNA, 24 bp, Artificial Sequence
  Description of Artificial Sequence: Synthetic primer
ggatatccctaatctattcccaag

SEQ ID NO: 91 - DNA, 23 bp, Artificial Sequence
  Description of Artificial Sequence: Synthetic primer
ctgccttacgcagataacatttg

SEQ ID NO: 92 - DNA, 22 bp, Artificial Sequence
  Description of Artificial Sequence: Synthetic primer
cgttgactattgacccaaacct

SEQ ID NO: 93 - DNA, 21 bp, Artificial Sequence
  Description of Artificial Sequence: Synthetic primer
gttccacaacgattcccactg

SEQ ID NO: 94 - DNA, 22 bp, Artificial Sequence
  Description of Artificial Sequence: Synthetic primer
tgccttcattgtgagcagaagt

SEQ ID NO: 95 - DNA, 20 bp, Artificial Sequence
  Description of Artificial Sequence: Synthetic primer
ttcccaccacctcaggccat

SEQ ID NO: 96 - DNA, 22 bp, Artificial Sequence
  Description of Artificial Sequence: Synthetic primer
cccaactccatgtttagactgg

SEQ ID NO: 97 - DNA, 24 bp, Artificial Sequence
  Description of Artificial Sequence: Synthetic primer
gaagttgcattcctcatacacatg

SEQ ID NO: 98 - DNA, 22 bp, Artificial Sequence
  Description of Artificial Sequence: Synthetic primer
tgtcacacagggagagataact

SEQ ID NO: 99 - DNA, 24 bp, Artificial Sequence
  Description of Artificial Sequence: Synthetic primer
cccactctcaactttacatgatac

SEQ ID NO: 100 - DNA, 23 bp, Artificial Sequence
  Description of Artificial Sequence: Synthetic primer
tccgtcgaactagaaatgcttag

SEQ ID NO: 101 - DNA, 22 bp, Artificial Sequence
  Description of Artificial Sequence: Synthetic primer
cctctgaatggttaggtcctta

SEQ ID NO: 102 - DNA, 22 bp, Artificial Sequence
  Description of Artificial Sequence: Synthetic primer
cccacagtttaaacgctctgta

SEQ ID NO: 103 - DNA, 20 bp, Artificial Sequence
  Description of Artificial Sequence: Synthetic primer
gatggtcaggtctgcctttg

SEQ ID NO: 104 - DNA, 23 bp, Artificial Sequence
  Description of Artificial Sequence: Synthetic primer
tcgtggttcttcttcaggtaggc

SEQ ID NO: 105 - DNA, 26 bp, Artificial Sequence
  Description of Artificial Sequence: Synthetic primer
gcataaagtgtaagtgtataagcata

SEQ ID NO: 106 - DNA, 19 bp, Artificial Sequence
  Description of Artificial Sequence: Synthetic primer
ggcaatgaggccacaggct

SEQ ID NO: 107 - DNA, 21 bp, Artificial Sequence
  Description of Artificial Sequence: Synthetic primer
gtcttcacaaagcgtgtctgc

SEQ ID NO: 108 - DNA, 21 bp, Artificial Sequence
  Description of Artificial Sequence: Synthetic primer
acagagtatttgcgctccgaa

SEQ ID NO: 109 - DNA, 21 bp, Artificial Sequence
  Description of Artificial Sequence: Synthetic primer
gtgtcttgatcacagtcccaa

SEQ ID NO: 110 - protein, 501 aa, Homo sapiens
MPAAMLPYACVLVLLGAHTAPAAGEAGGSCLRWEPHCQQPLPDRVPSTAILPPRLNGPWISTGCEVRPGPEFLTRAYTFYPSRLFRAHQFYYEDPFCGEPAHSLLVKGKVRLRRASWVTRGATEADYHLHKVGIVFHSRRALVDVTGRLNQTRAGRDCARRLPPARAWLPGALYELRSARAQGDCLEALGLTMHELSLVRVQRRLQPQPRASPRLVEELYLGDIHTDPAERRHYRPTGYQRPLQSALHHVQPCPACGLIARSDVHHPPVLPPPLALPLHLGGWWVSSGCEVRPAVLFLTRLFTFHGHSRSWEGYYHHFSDPACRQPTFTVYAAGRYTRGTPSTRVRGGTELVFEVTRAHVTPMDQVTTAMLNFSEPSSCGGAGAWSMGTERDVTATNGCLPLGIRLPHVEYELFKMEQDPLGQSLLFIGQRPTDGSSPDTPEKRPTSYQAPLVLCHGEAPDFSRPPQHRPSLQKHPSTGGLHIAPFPLLPLVLGLAFLHWL

SEQ ID NO: 111 - DNA, 3112 bp, Homo sapiens
acaactatcaacagccgggaaggctgagcgcgtgtgagcgccgaggggggcgcaggaccctcgcaacttcttcgcaggactccagcctggccgccggcgcccgcagccgtccgagagccctgcgcccgcgcctccccttgcgcaccgtggcagcgcccggcgggcggtcctgccagccccgacgggatgcccgcagccatgctcccctacgcttgcgtcctggtgcttttgggagcccacactgcaccggcggctggggaggccgggggcagctgcctgcgctgggaaccccactgccagcagcccttgccagatagagtgcccagcactgcgatcctgcctccacgccttaatggaccttggatctccacaggctgcgaggtgcgcccaggaccggagttcctgacccgcgcctacaccttctaccccagccggctctttcgagcccaccagttctactacgaggaccccttctgcggggaacctgcccactcgctgctcgtcaagggcaaagtccgcctgcgccgggcctcctgggtcacccggggagccaccgaggccgactaccacctgcacaaggtgggcatcgtcttccacagccgccgggccctggtcgacgtcaccgggcgcctcaaccagacccgcgccggccgggactgcgcgcggcggctgcctccggcccgggcctggctgcctggggcgctgtacgagctgcggagcgcccgggctcagggggactgcctggaggcgctgggcctcaccatgcacgagctcagcctggtccgcgtgcagcgccgcctgcagccgcagccccgggcgtcgccccggctggtggaggagctgtacctgggggacatccacaccgacccggcggagaggcggcactaccggcccacgggctaccagcgcccgctgcagagcgcactgcaccacgtgcagccgtgcccagcctgtggcctcattgcccgctccgatgtgcaccacccgcccgtgctgccgccccctctggccctgcccctgcacctgggcggctggtgggtcagctcggggtgcgaggtgcgcccagcagtcctgttcctcacccggctcttcactttccacgggcacagccgctcctgggaagggtattaccaccacttctcagacccagcctgccggcagcccaccttcaccgtgtatgccgccggccgctacaccaggggcacgccatccaccagggtccgcggcggcaccgagctggtgtttgaggtcacacgggcccatgtgacccccatggaccaggtcaccacggccatgctcaacttctctgagccaagcagctgtgggggtgcgggggcctggtccatgggcactgagcgggatgtcacagccaccaacggctgcctaccgctgggcatccggctcccgcatgtggagtacgagcttttcaagatggaacaagaccccctcgggcaaagcctgctcttcatcggacaaaggcccaccgatggctcaagtcccgataccccagagaaacgtcccacctcctaccaagcacccctggtgctctgtcatggggaggcccccgacttctccaggccaccgcagcacaggccatcgctgcagaagcaccccagcacagggggtcttcacatagcccccttcccacttctgcccctagttctagggctggccttcctccactggctatgacattggacttgacatcaggatggcggctctggacacccattcaacccttcagactccctcctggcagctgtagggaaggaaccattctcctctgctctgtcatggatggatgcacagccccactgcttccaaactctgcctgtgtcccatgtggctcaggacatgagcttaacccctgcaaagcctataccacatcccacagcccgggtccccagtcaagcacttggatgcggcagtgatgttcatcgctacgtgagtttctaaagatcactcccaatttttctactttcctcatccttggcagctcgccaacaggttcagtcagggggccacacggaacacccccatcccatgttccccccagttcttcccatcctgacccttgggattccaagatgggagcaagaggagatcctgaggctctgcctagggacgaggcctacagttctgccatgtctgtaggttgttgtttaaagattattaattcgaatttagcaatacgatctctaagtggtgccatgaattaaagatgccacttcgggctttcagtgcttctcagcttttgggcaaagggcttgtgtcttcaggggcagctcagctttcctgagtcctgactgctggcactcgtctgcatttgcctgtgcttctgcgagtcggacctcaagctgccaacactgcatgtggataaatccagttttcccgggccagcatgcaaaatgaagaggactccatctaagctgagaagcatggcctccccagagcagcctgcggcctccaagccttcctggcccaggcaaatgccagtgtgcaccaggctggctgctgggggcaggtctttggaggggagcagcatttccagccttctgaacatagttaatagtaatgacagccgtaacactaacgcgctctgcaattcgccctgcccagccatcctcggttgccaagattgcctgtgcctgcctgacaaaggaagagaatctccgaatgtgtatctttgggcccaccctagggagaggtcggggtcaccaggctacatggcgacatctaggcagctccgccttgcccagcctccttgccataatcctaatatattggtgtcctctgctcagaggggactgtcatcatggtgggaacaggctgtgcctccccagggactctgcccatgttcccagggcctcatctgtacactgtgaaattaactggcatcctggtgggcccaagggttttcaggactgggggccaatgactcaccccctccttcctcctcctgatccctatctctagctcttatcacagattttgaacaattgtctgtgaggttaatgatggtttcagagggaagcccttttcctccctgagactgtgtggggttcagtcagcctgctgaaattgcttccacttattacccatccttcctctt

SEQ ID NO: 112 - DNA, 19 bp, Artificial Sequence
  Description of Artificial Sequence: Synthetic oligonucleotide
gaaatatgaagagacgctg

SEQ ID NO: 113 - DNA, 19 bp, Artificial Sequence
  Description of Artificial Sequence: Synthetic oligonucleotide
aaatatgaagagacgctgc

SEQ ID NO: 114 - DNA, 19 bp, Artificial Sequence
  Description of Artificial Sequence: Synthetic oligonucleotide
aatatgaagagacgctgca

SEQ ID NO: 115 - DNA, 19 bp, Artificial Sequence
  Description of Artificial Sequence: Synthetic oligonucleotide
atatgaagagacgctgcag

SEQ ID NO: 116 - DNA, 19 bp, Artificial Sequence
  Description of Artificial Sequence: Synthetic oligonucleotide
tatgaagagacgctgcagc

SEQ ID NO: 117 - DNA, 19 bp, Artificial Sequence
  Description of Artificial Sequence: Synthetic oligonucleotide
atgaagagacgctgcagct

SEQ ID NO: 118 - DNA, 19 bp, Artificial Sequence
  Description of Artificial Sequence: Synthetic oligonucleotide
tgaagagacgctgcagctg

SEQ ID NO: 119 - DNA, 19 bp, Artificial Sequence
  Description of Artificial Sequence: Synthetic oligonucleotide
gaagagacgctgcagctgc

SEQ ID NO: 120 - DNA, 19 bp, Artificial Sequence
  Description of Artificial Sequence: Synthetic oligonucleotide
aagagacgctgcagctgcg

SEQ ID NO: 121 - DNA, 19 bp, Artificial Sequence
  Description of Artificial Sequence: Synthetic oligonucleotide
agagacgctgcagctgcgg

SEQ ID NO: 122 - DNA, 19 bp, Artificial Sequence
  Description of Artificial Sequence: Synthetic oligonucleotide
gagacgctgcagctgcggt

SEQ ID NO: 123 - DNA, 19 bp, Artificial Sequence
  Description of Artificial Sequence: Synthetic oligonucleotide
agacgctgcagctgcggtg

SEQ ID NO: 124 - DNA, 19 bp, Artificial Sequence
  Description of Artificial Sequence: Synthetic oligonucleotide
gacgctgcagctgcggtgg

SEQ ID NO: 125 - DNA, 19 bp, Artificial Sequence
  Description of Artificial Sequence: Synthetic oligonucleotide
acgctgcagctgcggtggc

SEQ ID NO: 126 - DNA, 19 bp, Artificial Sequence
  Description of Artificial Sequence: Synthetic oligonucleotide
cgctgcagctgcggtggcg

SEQ ID NO: 127 - DNA, 19 bp, Artificial Sequence
  Description of Artificial Sequence: Synthetic oligonucleotide
gctgcagctgcggtggcgg

SEQ ID NO: 128 - DNA, 19 bp, Artificial Sequence
  Description of Artificial Sequence: Synthetic oligonucleotide
ctgcagctgcggtggcggt

SEQ ID NO: 129 - DNA, 19 bp, Artificial Sequence
  Description of Artificial Sequence: Synthetic oligonucleotide
tgcagctgcggtggcggtg

SEQ ID NO: 130 - DNA, 19 bp, Artificial Sequence
  Description of Artificial Sequence: Synthetic oligonucleotide
gcagctgcggtggcggtgg

SEQ ID NO: 131 - DNA, 19 bp, Artificial Sequence
  Description of Artificial Sequence: Synthetic oligonucleotide
cagctgcggtggcggtggc

SEQ ID NO: 132 - DNA, 19 bp, Artificial Sequence
  Description of Artificial Sequence: Synthetic oligonucleotide
agctgcggtggcggtggcg

SEQ ID NO: 133 - DNA, 19 bp, Artificial Sequence
  Description of Artificial Sequence: Synthetic oligonucleotide
gctgcggtggcggtggcgg

SEQ ID NO: 134 - DNA, 19 bp, Artificial Sequence
  Description of Artificial Sequence: Synthetic oligonucleotide
ctgcggtggcggtggcggc

SEQ ID NO: 135 - DNA, 19 bp, Artificial Sequence
  Description of Artificial Sequence: Synthetic oligonucleotide
tgcggtggcggtggcggcc

SEQ ID NO: 136 - DNA, 19 bp, Artificial Sequence
  Description of Artificial Sequence: Synthetic oligonucleotide
gcggtggcggtggcggcca

SEQ ID NO: 137 - DNA, 19 bp, Artificial Sequence
  Description of Artificial Sequence: Synthetic oligonucleotide
cggtggcggtggcggccac

SEQ ID NO: 138 - DNA, 19 bp, Artificial Sequence
  Description of Artificial Sequence: Synthetic oligonucleotide
ggtggcggtggcggccact

SEQ ID NO: 139 - DNA, 19 bp, Artificial Sequence
  Description of Artificial Sequence: Synthetic oligonucleotide
gtggcggtggcggccactg

SEQ ID NO: 140 - DNA, 19 bp, Artificial Sequence
  Description of Artificial Sequence: Synthetic oligonucleotide
tggcggtggcggccactgc

SEQ ID NO: 141 - DNA, 19 bp, Artificial Sequence
  Description of Artificial Sequence: Synthetic oligonucleotide
ggcggtggcggccactgca

SEQ ID NO: 142 - DNA, 19 bp, Artificial Sequence
  Description of Artificial Sequence: Synthetic oligonucleotide
gcggtggcggccactgcag

SEQ ID NO: 143 - DNA, 19 bp, Artificial Sequence
  Description of Artificial Sequence: Synthetic oligonucleotide
cggtggcggccactgcagc

SEQ ID NO: 144 - DNA, 19 bp, Artificial Sequence
  Description of Artificial Sequence: Synthetic oligonucleotide
ggtggcggccactgcagct

SEQ ID NO: 145 - DNA, 19 bp, Artificial Sequence
  Description of Artificial Sequence: Synthetic oligonucleotide
gtggcggccactgcagctc

SEQ ID NO: 146 - DNA, 19 bp, Artificial Sequence
  Description of Artificial Sequence: Synthetic oligonucleotide
tggcggccactgcagctca

SEQ ID NO: 147 - DNA, 19 bp, Artificial Sequence
  Description of Artificial Sequence: Synthetic oligonucleotide
ggcggccactgcagctcag

SEQ ID NO: 148 - DNA, 19 bp, Artificial Sequence
  Description of Artificial Sequence: Synthetic oligonucleotide
gcggccactgcagctcaga

SEQ ID NO: 149 - DNA, 19 bp, Artificial Sequence
  Description of Artificial Sequence: Synthetic oligonucleotide
cggccactgcagctcagag

SEQ ID NO: 150 - DNA, 19 bp, Artificial Sequence
  Description of Artificial Sequence: Synthetic oligonucleotide
ggccactgcagctcagagc

SEQ ID NO: 151 - DNA, 19 bp, Artificial Sequence
  Description of Artificial Sequence: Synthetic oligonucleotide
gccactgcagctcagagcg

SEQ ID NO: 152 - DNA, 19 bp, Artificial Sequence
  Description of Artificial Sequence: Synthetic oligonucleotide
ccactgcagctcagagcgg

SEQ ID NO: 153 - DNA, 19 bp, Artificial Sequence
  Description of Artificial Sequence: Synthetic oligonucleotide
cactgcagctcagagcggc

SEQ ID NO: 154 - DNA, 19 bp, Artificial Sequence
  Description of Artificial Sequence: Synthetic oligonucleotide
actgcagctcagagcggcg

SEQ ID NO: 155 - DNA, 19 bp, Artificial Sequence
  Description of Artificial Sequence: Synthetic oligonucleotide
ctgcagctcagagcggcgc

SEQ ID NO: 156 - DNA, 19 bp, Artificial Sequence
  Description of Artificial Sequence: Synthetic oligonucleotide
tgcagctcagagcggcgca

SEQ ID NO: 157 - DNA, 19 bp, Artificial Sequence
  Description of Artificial Sequence: Synthetic oligonucleotide
gcagctcagagcggcgcac

SEQ ID NO: 158 - DNA, 19 bp, Artificial Sequence
  Description of Artificial Sequence: Synthetic oligonucleotide
cagctcagagcggcgcacg

SEQ ID NO: 159 - DNA, 19 bp, Artificial Sequence
  Description of Artificial Sequence: Synthetic oligonucleotide
agctcagagcggcgcacgc

SEQ ID NO: 160 - DNA, 19 bp, Artificial Sequence
  Description of Artificial Sequence: Synthetic oligonucleotide
gctcagagcggcgcacgcg

SEQ ID NO: 161 - DNA, 19 bp, Artificial Sequence
  Description of Artificial Sequence: Synthetic oligonucleotide
ctcagagcggcgcacgcgg

SEQ ID NO: 162 - DNA, 19 bp, Artificial Sequence
  Description of Artificial Sequence: Synthetic oligonucleotide
tcagagcggcgcacgcggc

SEQ ID NO: 163 - DNA, 19 bp, Artificial Sequence
  Description of Artificial Sequence: Synthetic oligonucleotide
cagagcggcgcacgcggcg

SEQ ID NO: 164 - DNA, 19 bp, Artificial Sequence
  Description of Artificial Sequence: Synthetic oligonucleotide
agagcggcgcacgcggcgg

SEQ ID NO: 165 - DNA, 19 bp, Artificial Sequence
  Description of Artificial Sequence: Synthetic oligonucleotide
gagcggcgcacgcggcggc

SEQ ID NO: 166 - DNA, 19 bp, Artificial Sequence
  Description of Artificial Sequence: Synthetic oligonucleotide
agcggcgcacgcggcggcc

SEQ ID NO: 167 - DNA, 19 bp, Artificial Sequence
  Description of Artificial Sequence: Synthetic oligonucleotide
gcggcgcacgcggcggccg

SEQ ID NO: 168 - DNA, 19 bp, Artificial Sequence
  Description of Artificial Sequence: Synthetic oligonucleotide
cggcgcacgcggcggccgg

SEQ ID NO: 169 - DNA, 19 bp, Artificial Sequence
  Description of Artificial Sequence: Synthetic oligonucleotide
ggcgcacgcggcggccggg

SEQ ID NO: 170 - DNA, 19 bp, Artificial Sequence
  Description of Artificial Sequence: Synthetic oligonucleotide
gcgcacgcggcggccgggg

SEQ ID NO: 171 - DNA, 19 bp, Artificial Sequence
  Description of Artificial Sequence: Synthetic oligonucleotide
cgcacgcggcggccggggc

SEQ ID NO: 172 - DNA, 19 bp, Artificial Sequence
  Description of Artificial Sequence: Synthetic oligonucleotide
gcacgcggcggccggggcg

SEQ ID NO: 173 - DNA, 19 bp, Artificial Sequence
  Description of Artificial Sequence: Synthetic oligonucleotide
cacgcggcggccggggcgg

SEQ ID NO: 174 - DNA, 19 bp, Artificial Sequence
  Description of Artificial Sequence: Synthetic oligonucleotide
acgcggcggccggggcggg

SEQ ID NO: 175 - DNA, 19 bp, Artificial Sequence
  Description of Artificial Sequence: Synthetic oligonucleotide
cgcggcggccggggcggga

SEQ ID NO: 176 - DNA, 19 bp, Artificial Sequence
  Description of Artificial Sequence: Synthetic oligonucleotide
gcggcggccggggcgggac

SEQ ID NO: 177 - DNA, 19 bp, Artificial Sequence
  Description of Artificial Sequence: Synthetic oligonucleotide
cggcggccggggcgggacg

SEQ ID NO: 178 - DNA, 19 bp, Artificial Sequence
  Description of Artificial Sequence: Synthetic oligonucleotide
ggcggccggggcgggacgc

SEQ ID NO: 179 - DNA, 19 bp, Artificial Sequence
  Description of Artificial Sequence: Synthetic oligonucleotide
gcggccggggcgggacgcg

SEQ ID NO: 180 - DNA, 19 bp, Artificial Sequence
  Description of Artificial Sequence: Synthetic oligonucleotide
cggccggggcgggacgcgg

SEQ ID NO: 181 - DNA, 19 bp, Artificial Sequence
  Description of Artificial Sequence: Synthetic oligonucleotide
ggccggggcgggacgcggg

SEQ ID NO: 182 - DNA, 19 bp, Artificial Sequence
  Description of Artificial Sequence: Synthetic oligonucleotide
gccggggcgggacgcgggg

SEQ ID NO: 183 - DNA, 19 bp, Artificial Sequence
  Description of Artificial Sequence: Synthetic oligonucleotide
ccggggcgggacgcggggc

SEQ ID NO: 184 - DNA, 19 bp, Artificial Sequence
  Description of Artificial Sequence: Synthetic oligonucleotide
cggggcgggacgcggggcc

SEQ ID NO: 185 - DNA, 19 bp, Artificial Sequence
  Description of Artificial Sequence: Synthetic oligonucleotide
ggggcgggacgcggggccg

SEQ ID NO: 186 - DNA, 19 bp, Artificial Sequence
  Description of Artificial Sequence: Synthetic oligonucleotide
gggcgggacgcggggccgg

SEQ ID NO: 187 - DNA, 19 bp, Artificial Sequence
  Description of Artificial Sequence: Synthetic oligonucleotide
ggcgggacgcggggccggg

SEQ ID NO: 188 - DNA, 19 bp, Artificial Sequence
  Description of Artificial Sequence: Synthetic oligonucleotide
gcgggacgcggggccgggc

SEQ ID NO: 189 - DNA, 19 bp, Artificial Sequence
  Description of Artificial Sequence: Synthetic oligonucleotide
cgggacgcggggccgggcg

SEQ ID NO: 190 - DNA, 19 bp, Artificial Sequence
  Description of Artificial Sequence: Synthetic oligonucleotide
gggacgcggggccgggcgc

SEQ ID NO: 191 - DNA, 19 bp, Artificial Sequence
  Description of Artificial Sequence: Synthetic oligonucleotide
ggacgcggggccgggcgcg

SEQ ID NO: 192 - DNA, 19 bp, Artificial Sequence
  Description of Artificial Sequence: Synthetic oligonucleotide
gacgcggggccgggcgcgg

SEQ ID NO: 193 - DNA, 19 bp, Artificial Sequence
  Description of Artificial Sequence: Synthetic oligonucleotide
acgcggggccgggcgcgga

SEQ ID NO: 194 - DNA, 19 bp, Artificial Sequence
  Description of Artificial Sequence: Synthetic oligonucleotide
cgcggggccgggcgcggag

SEQ ID NO: 195 - DNA, 19 bp, Artificial Sequence
  Description of Artificial Sequence: Synthetic oligonucleotide
gcggggccgggcgcggaga

SEQ ID NO: 196 - DNA, 19 bp, Artificial Sequence
  Description of Artificial Sequence: Synthetic oligonucleotide
cggggccgggcgcggagaa

SEQ ID NO: 197 - DNA, 19 bp, Artificial Sequence
  Description of Artificial Sequence: Synthetic oligonucleotide
ggggccgggcgcggagaag

SEQ ID NO: 198 - DNA, 19 bp, Artificial Sequence
  Description of Artificial Sequence: Synthetic oligonucleotide
gggccgggcgcggagaagt

SEQ ID NO: 199 - DNA, 19 bp, Artificial Sequence
  Description of Artificial Sequence: Synthetic oligonucleotide
ggccgggcgcggagaagtc

SEQ ID NO: 200 - DNA, 19 bp, Artificial Sequence
  Description of Artificial Sequence: Synthetic oligonucleotide
gccgggcgcggagaagtcg

SEQ ID NO: 201 - DNA, 19 bp, Artificial Sequence
  Description of Artificial Sequence: Synthetic oligonucleotide
ccgggcgcggagaagtcgg

SEQ ID NO: 202 - DNA, 19 bp, Artificial Sequence
  Description of Artificial Sequence: Synthetic oligonucleotide
cgggcgcggagaagtcggg

SEQ ID NO: 203 - DNA, 19 bp, Artificial Sequence
  Description of Artificial Sequence: Synthetic oligonucleotide
gggcgcggagaagtcgggg

SEQ ID NO: 204 - DNA, 19 bp, Artificial Sequence
  Description of Artificial Sequence: Synthetic oligonucleotide
ggcgcggagaagtcggggc

SEQ ID NO: 205 - DNA, 19 bp, Artificial Sequence
  Description of Artificial Sequence: Synthetic oligonucleotide
gcgcggagaagtcggggcg

SEQ ID NO: 206 - DNA, 19 bp, Artificial Sequence
  Description of Artificial Sequence: Synthetic oligonucleotide
cgcggagaagtcggggcgg

SEQ ID NO: 207 - DNA, 19 bp, Artificial Sequence
  Description of Artificial Sequence: Synthetic oligonucleotide
gcggagaagtcggggcggg

SEQ ID NO: 208 - DNA, 19 bp, Artificial Sequence
  Description of Artificial Sequence: Synthetic oligonucleotide
cggagaagtcggggcgggc

SEQ ID NO: 209 - DNA, 19 bp, Artificial Sequence
  Description of Artificial Sequence: Synthetic oligonucleotide
ggagaagtcggggcgggcg

SEQ ID NO: 210 - DNA, 19 bp, Artificial Sequence
  Description of Artificial Sequence: Synthetic oligonucleotide
gagaagtcggggcgggcgg

SEQ ID NO: 211 - DNA, 19 bp, Artificial Sequence
  Description of Artificial Sequence: Synthetic oligonucleotide
agaagtcggggcgggcggc

SEQ ID NO: 212 - DNA, 19 bp, Artificial Sequence
  Description of Artificial Sequence: Synthetic oligonucleotide
gaagtcggggcgggcggca

SEQ ID NO: 213 - DNA, 19 bp, Artificial Sequence
  Description of Artificial Sequence: Synthetic oligonucleotide
aagtcggggcgggcggcag

SEQ ID NO: 214 - DNA, 19 bp, Artificial Sequence
  Description of Artificial Sequence: Synthetic oligonucleotide
agtcggggcgggcggcaga

SEQ ID NO: 215 - DNA, 19 bp, Artificial Sequence
  Description of Artificial Sequence: Synthetic oligonucleotide
gtcggggcgggcggcagag

SEQ ID NO: 216 - DNA, 19 bp, Artificial Sequence
  Description of Artificial Sequence: Synthetic oligonucleotide
tcggggcgggcggcagaga

SEQ ID NO: 217 - DNA, 19 bp, Artificial Sequence
  Description of Artificial Sequence: Synthetic oligonucleotide
cggggcgggcggcagagag

SEQ ID NO: 218 - DNA, 19 bp, Artificial Sequence
  Description of Artificial Sequence: Synthetic oligonucleotide
ggggcgggcggcagagagg

SEQ ID NO: 219 - DNA, 19 bp, Artificial Sequence
  Description of Artificial Sequence: Synthetic oligonucleotide
gggcgggcggcagagaggc

SEQ ID NO: 220 - DNA, 19 bp, Artificial Sequence
  Description of Artificial Sequence: Synthetic oligonucleotide
ggcgggcggcagagaggcc

SEQ ID NO: 221 - DNA, 19 bp, Artificial Sequence
  Description of Artificial Sequence: Synthetic oligonucleotide
gcgggcggcagagaggccg

SEQ ID NO: 222 - DNA, 19 bp, Artificial Sequence
  Description of Artificial Sequence: Synthetic oligonucleotide
cgggcggcagagaggccgg

SEQ ID NO: 223 - DNA, 19 bp, Artificial Sequence
  Description of Artificial Sequence: Synthetic oligonucleotide
gggcggcagagaggccggg

SEQ ID NO: 224 - DNA, 19 bp, Artificial Sequence
  Description of Artificial Sequence: Synthetic oligonucleotide
ggcggcagagaggccggga

SEQ ID NO: 225 - DNA, 19 bp, Artificial Sequence
  Description of Artificial Sequence: Synthetic oligonucleotide
gcggcagagaggccgggac

SEQ ID NO: 226 - DNA, 19 bp, Artificial Sequence
  Description of Artificial Sequence: Synthetic oligonucleotide
cggcagagaggccgggacg

SEQ ID NO: 227 - DNA, 19 bp, Artificial Sequence
  Description of Artificial Sequence: Synthetic oligonucleotide
ggcagagaggccgggacgc

SEQ ID NO: 228 - DNA, 19 bp, Artificial Sequence
  Description of Artificial Sequence: Synthetic oligonucleotide
gcagagaggccgggacgcg

SEQ ID NO: 229 - DNA, 19 bp, Artificial Sequence
  Description of Artificial Sequence: Synthetic oligonucleotide
cagagaggccgggacgcgg

SEQ ID NO: 230 - DNA, 19 bp, Artificial Sequence
  Description of Artificial Sequence: Synthetic oligonucleotide
agagaggccgggacgcgga

SEQ ID NO: 231 - DNA, 19 bp, Artificial Sequence
  Description of Artificial Sequence: Synthetic oligonucleotide
gagaggccgggacgcggac

SEQ ID NO: 232 - DNA, 19 bp, Artificial Sequence
  Description of Artificial Sequence: Synthetic oligonucleotide
agaggccgggacgcggacc

SEQ ID NO: 233 - DNA, 19 bp, Artificial Sequence
  Description of Artificial Sequence: Synthetic oligonucleotide
gaggccgggacgcggaccg

SEQ ID NO: 234 - DNA, 19 bp, Artificial Sequence
  Description of Artificial Sequence: Synthetic oligonucleotide
aggccgggacgcggaccgg

SEQ ID NO: 235 - DNA, 19 bp, Artificial Sequence
  Description of Artificial Sequence: Synthetic oligonucleotide
ggccgggacgcggaccggg

SEQ ID NO: 236 - DNA, 19 bp, Artificial Sequence
  Description of Artificial Sequence: Synthetic oligonucleotide
gccgggacgcggaccgggc

SEQ ID NO: 237 - DNA, 19 bp, Artificial Sequence
  Description of Artificial Sequence: Synthetic oligonucleotide
ccgggacgcggaccgggcc

SEQ ID NO: 238 - DNA, 19 bp, Artificial Sequence
  Description of Artificial Sequence: Synthetic oligonucleotide
cgggacgcggaccgggccg

SEQ ID NO: 239 - DNA, 19 bp, Artificial Sequence
  Description of Artificial Sequence: Synthetic oligonucleotide
gggacgcggaccgggccgg

SEQ ID NO: 240 - DNA, 19 bp, Artificial Sequence
  Description of Artificial Sequence: Synthetic oligonucleotide
ggacgcggaccgggccggg

SEQ ID NO: 241 - DNA, 19 bp, Artificial Sequence
  Description of Artificial Sequence: Synthetic oligonucleotide
gacgcggaccgggccgggg

SEQ ID NO: 242 - DNA, 19 bp, Artificial Sequence
  Description of Artificial Sequence: Synthetic oligonucleotide
acgcggaccgggccggggc

SEQ ID NO: 243 - DNA, 19 bp, Artificial Sequence
  Description of Artificial Sequence: Synthetic oligonucleotide
cgcggaccgggccggggcg

SEQ ID NO: 244 - DNA, 19 bp, Artificial Sequence
  Description of Artificial Sequence: Synthetic oligonucleotide
gcggaccgggccggggcgc

SEQ ID NO: 245 - DNA, 19 bp, Artificial Sequence
  Description of Artificial Sequence: Synthetic oligonucleotide
cggaccgggccggggcgcc

SEQ ID NO: 246 - DNA, 19 bp, Artificial Sequence
  Description of Artificial Sequence: Synthetic oligonucleotide
ggaccgggccggggcgccc

SEQ ID NO: 247 - DNA, 19 bp, Artificial Sequence
  Description of Artificial Sequence: Synthetic oligonucleotide
gaccgggccggggcgccca

SEQ ID NO: 248 - DNA, 19 bp, Artificial Sequence
  Description of Artificial Sequence: Synthetic oligonucleotide
accgggccggggcgcccac

SEQ ID NO: 249 - DNA, 19 bp, Artificial Sequence
  Description of Artificial Sequence: Synthetic oligonucleotide
ccgggccggggcgcccaca

SEQ ID NO: 250 - DNA, 19 bp, Artificial Sequence
  Description of Artificial Sequence: Synthetic oligonucleotide
cgggccggggcgcccacag

SEQ ID NO: 251 - DNA, 19 bp, Artificial Sequence
  Description of Artificial Sequence: Synthetic oligonucleotide
gggccggggcgcccacagc

SEQ ID NO: 252 - DNA, 19 bp, Artificial Sequence
  Description of Artificial Sequence: Synthetic oligonucleotide
ggccggggcgcccacagcc

SEQ ID NO: 253 - DNA, 19 bp, Artificial Sequence
  Description of Artificial Sequence: Synthetic oligonucleotide
gccggggcgcccacagccg

SEQ ID NO: 254 - DNA, 19 bp, Artificial Sequence
  Description of Artificial Sequence: Synthetic oligonucleotide
ccggggcgcccacagccgc

SEQ ID NO: 255 - DNA, 19 bp, Artificial Sequence
  Description of Artificial Sequence: Synthetic oligonucleotide
cggggcgcccacagccgcc

SEQ ID NO: 256 - DNA, 19 bp, Artificial Sequence
  Description of Artificial Sequence: Synthetic oligonucleotide
ggggcgcccacagccgccc

SEQ ID NO: 257 - DNA, 19 bp, Artificial Sequence
  Description of Artificial Sequence: Synthetic oligonucleotide
gggcgcccacagccgcccg

SEQ ID NO: 258 - DNA, 19 bp, Artificial Sequence
  Description of Artificial Sequence: Synthetic oligonucleotide
ggcgcccacagccgcccga

SEQ ID NO: 259 - DNA, 19 bp, Artificial Sequence
  Description of Artificial Sequence: Synthetic oligonucleotide
gcgcccacagccgcccgac

SEQ ID NO: 260 - DNA, 19 bp, Artificial Sequence
  Description of Artificial Sequence: Synthetic oligonucleotide
cgcccacagccgcccgacg

SEQ ID NO: 261 - DNA, 19 bp, Artificial Sequence
  Description of Artificial Sequence: Synthetic oligonucleotide
gcccacagccgcccgacgg

SEQ ID NO: 262 - DNA, 19 bp, Artificial Sequence
  Description of Artificial Sequence: Synthetic oligonucleotide
cccacagccgcccgacggc

SEQ ID NO: 263 - DNA, 19 bp, Artificial Sequence
  Description of Artificial Sequence: Synthetic oligonucleotide
ccacagccgcccgacggcg

SEQ ID NO: 264 - DNA, 19 bp, Artificial Sequence
  Description of Artificial Sequence: Synthetic oligonucleotide
cacagccgcccgacggcgc

SEQ ID NO: 265 - DNA, 19 bp, Artificial Sequence
  Description of Artificial Sequence: Synthetic oligonucleotide
acagccgcccgacggcgcc

SEQ ID NO: 266 - DNA, 19 bp, Artificial Sequence
  Description of Artificial Sequence: Synthetic oligonucleotide
cagccgcccgacggcgccc

SEQ ID NO: 267 - DNA, 19 bp, Artificial Sequence
  Description of Artificial Sequence: Synthetic oligonucleotide
agccgcccgacggcgccca

SEQ ID NO: 268 - DNA, 19 bp, Artificial Sequence
  Description of Artificial Sequence: Synthetic oligonucleotide
gccgcccgacggcgcccag

SEQ ID NO: 269 - DNA, 19 bp, Artificial Sequence
  Description of Artificial Sequence: Synthetic oligonucleotide
ccgcccgacggcgcccaga

SEQ ID NO: 270 - DNA, 19 bp, Artificial Sequence
  Description of Artificial Sequence: Synthetic oligonucleotide
cgcccgacggcgcccagag

SEQ ID NO: 271 - DNA, 19 bp, Artificial Sequence
  Description of Artificial Sequence: Synthetic oligonucleotide
gcccgacggcgcccagaga

SEQ ID NO: 272 - DNA, 19 bp, Artificial Sequence
  Description of Artificial Sequence: Synthetic oligonucleotide
cccgacggcgcccagagag

SEQ ID NO: 273 - DNA, 19 bp, Artificial Sequence
  Description of Artificial Sequence: Synthetic oligonucleotide
ccgacggcgcccagagagc

SEQ ID NO: 274 - DNA, 19 bp, Artificial Sequence
  Description of Artificial Sequence: Synthetic oligonucleotide
cgacggcgcccagagagcg

SEQ ID NO: 275 - DNA, 19 bp, Artificial Sequence
  Description of Artificial Sequence: Synthetic oligonucleotide
gacggcgcccagagagcgc

SEQ ID NO: 276 - DNA, 19 bp, Artificial Sequence
  Description of Artificial Sequence: Synthetic oligonucleotide
acggcgcccagagagcgcg

SEQ ID NO: 277 - DNA, 19 bp, Artificial Sequence
  Description of Artificial Sequence: Synthetic oligonucleotide
cggcgcccagagagcgcgc

SEQ ID NO: 278 - DNA, 19 bp, Artificial Sequence
  Description of Artificial Sequence: Synthetic oligonucleotide
ggcgcccagagagcgcgcg

SEQ ID NO: 279 - DNA, 19 bp, Artificial Sequence
  Description of Artificial Sequence: Synthetic oligonucleotide
gcgcccagagagcgcgcgc

SEQ ID NO: 280 - DNA, 19 bp, Artificial Sequence
  Description of Artificial Sequence: Synthetic oligonucleotide
cgcccagagagcgcgcgcc

SEQ ID NO: 281 - DNA, 19 bp, Artificial Sequence
  Description of Artificial Sequence: Synthetic oligonucleotide
gcccagagagcgcgcgccc

SEQ ID NO: 282 - DNA, 19 bp, Artificial Sequence
  Description of Artificial Sequence: Synthetic oligonucleotide
cccagagagcgcgcgcccc

SEQ ID NO: 283 - DNA, 19 bp, Artificial Sequence
  Description of Artificial Sequence: Synthetic oligonucleotide
ccagagagcgcgcgccccg

SEQ ID NO: 284 - DNA, 19 bp, Artificial Sequence
  Description of Artificial Sequence: Synthetic oligonucleotide
cagagagcgcgcgccccgc

SEQ ID NO: 285 - DNA, 19 bp, Artificial Sequence
  Description of Artificial Sequence: Synthetic oligonucleotide
agagagcgcgcgccccgca

SEQ ID NO: 286 - DNA, 19 bp, Artificial Sequence
  Description of Artificial Sequence: Synthetic oligonucleotide
gagagcgcgcgccccgcag

SEQ ID NO: 287 - DNA, 19 bp, Artificial Sequence
  Description of Artificial Sequence: Synthetic oligonucleotide
agagcgcgcgccccgcagc

SEQ ID NO: 288 - DNA, 19 bp, Artificial Sequence
  Description of Artificial Sequence: Synthetic oligonucleotide
gagcgcgcgccccgcagcc

SEQ ID NO: 289 - DNA, 19 bp, Artificial Sequence
  Description of Artificial Sequence: Synthetic oligonucleotide
agcgcgcgccccgcagccc

SEQ ID NO: 290 - DNA, 19 bp, Artificial Sequence
  Description of Artificial Sequence: Synthetic oligonucleotide
gcgcgcgccccgcagcccc

SEQ ID NO: 291 - DNA, 19 bp, Artificial Sequence
  Description of Artificial Sequence: Synthetic oligonucleotide
cgcgcgccccgcagccccg

SEQ ID NO: 292 - DNA, 19 bp, Artificial Sequence
  Description of Artificial Sequence: Synthetic oligonucleotide
gcgcgccccgcagccccgc

SEQ ID NO: 293 - DNA, 19 bp, Artificial Sequence
  Description of Artificial Sequence: Synthetic oligonucleotide
cgcgccccgcagccccgcg

SEQ ID NO: 294 - DNA, 19 bp, Artificial Sequence
  Description of Artificial Sequence: Synthetic oligonucleotide
gcgccccgcagccccgcgc

SEQ ID NO: 295 - DNA, 19 bp, Artificial Sequence
  Description of Artificial Sequence: Synthetic oligonucleotide
cgccccgcagccccgcgcc

SEQ ID NO: 296 - DNA, 19 bp, Artificial Sequence
  Description of Artificial Sequence: Synthetic oligonucleotide
gccccgcagccccgcgcct

SEQ ID NO: 297 - DNA, 19 bp, Artificial Sequence
  Description of Artificial Sequence: Synthetic oligonucleotide
ccccgcagccccgcgccta

SEQ ID NO: 298 - DNA, 19 bp, Artificial Sequence
  Description of Artificial Sequence: Synthetic oligonucleotide
cccgcagccccgcgcctag

SEQ ID NO: 299 - DNA, 19 bp, Artificial Sequence
  Description of Artificial Sequence: Synthetic oligonucleotide
ccgcagccccgcgcctagc

SEQ ID NO: 300 - DNA, 19 bp, Artificial Sequence
  Description of Artificial Sequence: Synthetic oligonucleotide
cgcagccccgcgcctagcc

SEQ ID NO: 301 - DNA, 19 bp, Artificial Sequence
  Description of Artificial Sequence: Synthetic oligonucleotide
gcagccccgcgcctagccc

SEQ ID NO: 302 - DNA, 19 bp, Artificial Sequence
  Description of Artificial Sequence: Synthetic oligonucleotide
cagccccgcgcctagcccg

SEQ ID NO: 303 - DNA, 19 bp, Artificial Sequence
  Description of Artificial Sequence: Synthetic oligonucleotide
agccccgcgcctagcccgc

SEQ ID NO: 304 - DNA, 19 bp, Artificial Sequence
  Description of Artificial Sequence: Synthetic oligonucleotide
gccccgcgcctagcccgcc

SEQ ID NO: 305 - DNA, 19 bp, Artificial Sequence
  Description of Artificial Sequence: Synthetic oligonucleotide
ccccgcgcctagcccgccg

SEQ ID NO: 306 - DNA, 19 bp, Artificial Sequence
  Description of Artificial Sequence: Synthetic oligonucleotide
cccgcgcctagcccgccgg

SEQ ID NO: 307 - DNA, 19 bp, Artificial Sequence
  Description of Artificial Sequence: Synthetic oligonucleotide
ccgcgcctagcccgccggg

SEQ ID NO: 308 - DNA, 19 bp, Artificial Sequence
  Description of Artificial Sequence: Synthetic oligonucleotide
cgcgcctagcccgccgggc

SEQ ID NO: 309 - DNA, 19 bp, Artificial Sequence
  Description of Artificial Sequence: Synthetic oligonucleotide
gcgcctagcccgccgggca

SEQ ID NO: 310 - DNA, 19 bp, Artificial Sequence
  Description of Artificial Sequence: Synthetic oligonucleotide
cgcctagcccgccgggcat

SEQ ID NO: 311 - DNA, 19 bp, Artificial Sequence
  Description of Artificial Sequence: Synthetic oligonucleotide
gcctagcccgccgggcatg

SEQ ID NO: 312 - DNA, 19 bp, Artificial Sequence
  Description of Artificial Sequence: Synthetic oligonucleotide
cctagcccgccgggcatgg

SEQ ID NO: 313 - DNA, 19 bp, Artificial Sequence
  Description of Artificial Sequence: Synthetic oligonucleotide
ctagcccgccgggcatggg

SEQ ID NO: 314 - DNA, 19 bp, Artificial Sequence
  Description of Artificial Sequence: Synthetic oligonucleotide
tagcccgccgggcatgggg

SEQ ID NO: 315 - DNA, 19 bp, Artificial Sequence
  Description of Artificial Sequence: Synthetic oligonucleotide
agcccgccgggcatggggc

SEQ ID NO: 316 - DNA, 19 bp, Artificial Sequence
  Description of Artificial Sequence: Synthetic oligonucleotide
gcccgccgggcatggggcg

SEQ ID NO: 317 - DNA, 19 bp, Artificial Sequence
  Description of Artificial Sequence: Synthetic oligonucleotide
cccgccgggcatggggcgc

SEQ ID NO: 318 - DNA, 19 bp, Artificial Sequence
  Description of Artificial Sequence: Synthetic oligonucleotide
ccgccgggcatggggcgcg

SEQ ID NO: 319 - DNA, 19 bp, Artificial Sequence
  Description of Artificial Sequence: Synthetic oligonucleotide
cgccgggcatggggcgcgc

SEQ ID NO: 320 - DNA, 19 bp, Artificial Sequence
  Description of Artificial Sequence: Synthetic oligonucleotide
gccgggcatggggcgcgcg

SEQ ID NO: 321 - DNA, 19 bp, Artificial Sequence
  Description of Artificial Sequence: Synthetic oligonucleotide
ccgggcatggggcgcgcgg

SEQ ID NO: 322 - DNA, 19 bp, Artificial Sequence
  Description of Artificial Sequence: Synthetic oligonucleotide
cgggcatggggcgcgcggc

SEQ ID NO: 323 - DNA, 19 bp, Artificial Sequence
  Description of Artificial Sequence: Synthetic oligonucleotide
gggcatggggcgcgcggca

SEQ ID NO: 324 - DNA, 19 bp, Artificial Sequence
  Description of Artificial Sequence: Synthetic oligonucleotide
ggcatggggcgcgcggcag

SEQ ID NO: 325 - DNA, 19 bp, Artificial Sequence
  Description of Artificial Sequence: Synthetic oligonucleotide
gcatggggcgcgcggcagc

SEQ ID NO: 326 - DNA, 19 bp, Artificial Sequence
  Description of Artificial Sequence: Synthetic oligonucleotide
catggggcgcgcggcagcc

SEQ ID NO: 327 - DNA, 19 bp, Artificial Sequence
  Description of Artificial Sequence: Synthetic oligonucleotide
atggggcgcgcggcagccg

SEQ ID NO: 328 - DNA, 19 bp, Artificial Sequence
  Description of Artificial Sequence: Synthetic oligonucleotide
tggggcgcgcggcagccgc

SEQ ID NO: 329 - DNA, 19 bp, Artificial Sequence
  Description of Artificial Sequence: Synthetic oligonucleotide
ggggcgcgcggcagccgcc

SEQ ID NO: 330 - DNA, 19 bp, Artificial Sequence
  Description of Artificial Sequence: Synthetic oligonucleotide
gggcgcgcggcagccgcct

SEQ ID NO: 331 - DNA, 19 bp, Artificial Sequence
  Description of Artificial Sequence: Synthetic oligonucleotide
ggcgcgcggcagccgcctg

SEQ ID NO: 332 - DNA, 19 bp, Artificial Sequence
  Description of Artificial Sequence: Synthetic oligonucleotide
gcgcgcggcagccgcctga

SEQ ID NO: 333 - DNA, 19 bp, Artificial Sequence
  Description of Artificial Sequence: Synthetic oligonucleotide
cgcgcggcagccgcctgaa

SEQ ID NO: 334 - DNA, 19 bp, Artificial Sequence
  Description of Artificial Sequence: Synthetic oligonucleotide
gcgcggcagccgcctgaag

SEQ ID NO: 335 - DNA, 19 bp, Artificial Sequence
  Description of Artificial Sequence: Synthetic oligonucleotide
cgcggcagccgcctgaagc

SEQ ID NO: 336 - DNA, 19 bp, Artificial Sequence
  Description of Artificial Sequence: Synthetic oligonucleotide
gcggcagccgcctgaagcc

SEQ ID NO: 337 - DNA, 19 bp, Artificial Sequence
  Description of Artificial Sequence: Synthetic oligonucleotide
cggcagccgcctgaagccc

SEQ ID NO: 338 - DNA, 19 bp, Artificial Sequence
  Description of Artificial Sequence: Synthetic oligonucleotide
ggcagccgcctgaagcccc

SEQ ID NO: 339 - DNA, 19 bp, Artificial Sequence
  Description of Artificial Sequence: Synthetic oligonucleotide
gcagccgcctgaagccccg

SEQ ID NO: 340 - DNA, 19 bp, Artificial Sequence
  Description of Artificial Sequence: Synthetic oligonucleotide
cagccgcctgaagccccgg

SEQ ID NO: 341 - DNA, 19 bp, Artificial Sequence
  Description of Artificial Sequence: Synthetic oligonucleotide
agccgcctgaagccccggc

SEQ ID NO: 342 - DNA, 19 bp, Artificial Sequence
  Description of Artificial Sequence: Synthetic oligonucleotide
gccgcctgaagccccggcc

SEQ ID NO: 343 - DNA, 19 bp, Artificial Sequence
  Description of Artificial Sequence: Synthetic oligonucleotide
ccgcctgaagccccggcct

SEQ ID NO: 344 - DNA, 19 bp, Artificial Sequence
  Description of Artificial Sequence: Synthetic oligonucleotide
cgcctgaagccccggcctg

SEQ ID NO: 345 - DNA, 19 bp, Artificial Sequence
  Description of Artificial Sequence: Synthetic oligonucleotide
gcctgaagccccggcctgg

SEQ ID NO: 346 - DNA, 19 bp, Artificial Sequence
  Description of Artificial Sequence: Synthetic oligonucleotide
cctgaagccccggcctggc

SEQ ID NO: 347 - DNA, 19 bp, Artificial Sequence
  Description of Artificial Sequence: Synthetic oligonucleotide
ctgaagccccggcctggcc

SEQ ID NO: 348 - DNA, 19 bp, Artificial Sequence
  Description of Artificial Sequence: Synthetic oligonucleotide
tgaagccccggcctggccc

SEQ ID NO: 349 - DNA, 19 bp, Artificial Sequence
  Description of Artificial Sequence: Synthetic oligonucleotide
gaagccccggcctggcccg

SEQ ID NO: 350 - DNA, 19 bp, Artificial Sequence
  Description of Artificial Sequence: Synthetic oligonucleotide
aagccccggcctggcccgg

SEQ ID NO: 351 - DNA, 19 bp, Artificial Sequence
  Description of Artificial Sequence: Synthetic oligonucleotide
agccccggcctggcccggc

SEQ ID NO: 352 - DNA, 19 bp, Artificial Sequence
  Description of Artificial Sequence: Synthetic oligonucleotide
gccccggcctggcccggcc

SEQ ID NO: 353 - DNA, 19 bp, Artificial Sequence
  Description of Artificial Sequence: Synthetic oligonucleotide
ccccggcctggcccggccg

SEQ ID NO: 354 - DNA, 19 bp, Artificial Sequence
  Description of Artificial Sequence: Synthetic oligonucleotide
cccggcctggcccggccgc

SEQ ID NO: 355 - DNA, 19 bp, Artificial Sequence
  Description of Artificial Sequence: Synthetic oligonucleotide
ccggcctggcccggccgca

SEQ ID NO: 356 - DNA, 19 bp, Artificial Sequence
  Description of Artificial Sequence: Synthetic oligonucleotide
cggcctggcccggccgcac

SEQ ID NO: 357 - DNA, 19 bp, Artificial Sequence
  Description of Artificial Sequence: Synthetic oligonucleotide
ggcctggcccggccgcacc

SEQ ID NO: 358 - DNA, 19 bp, Artificial Sequence
  Description of Artificial Sequence: Synthetic oligonucleotide
gcctggcccggccgcaccc

SEQ ID NO: 359 - DNA, 19 bp, Artificial Sequence
  Description of Artificial Sequence: Synthetic oligonucleotide
cctggcccggccgcacccg

SEQ ID NO: 360 - DNA, 19 bp, Artificial Sequence
  Description of Artificial Sequence: Synthetic oligonucleotide
ctggcccggccgcacccgg

SEQ ID NO: 361 - DNA, 19 bp, Artificial Sequence
  Description of Artificial Sequence: Synthetic oligonucleotide
tggcccggccgcacccggc

SEQ ID NO: 362 - DNA, 19 bp, Artificial Sequence
  Description of Artificial Sequence: Synthetic oligonucleotide
ggcccggccgcacccggcc

SEQ ID NO: 363 - DNA, 19 bp, Artificial Sequence
  Description of Artificial Sequence: Synthetic oligonucleotide
gcccggccgcacccggccg

SEQ ID NO: 364 - DNA, 19 bp, Artificial Sequence
  Description of Artificial Sequence: Synthetic oligonucleotide
cccggccgcacccggccgg

SEQ ID NO: 365 - DNA, 19 bp, Artificial Sequence
  Description of Artificial Sequence: Synthetic oligonucleotide
ccggccgcacccggccgga

SEQ ID NO: 366 - DNA, 19 bp, Artificial Sequence
  Description of Artificial Sequence: Synthetic oligonucleotide
cggccgcacccggccggag

SEQ ID NO: 367 - DNA, 19 bp, Artificial Sequence
  Description of Artificial Sequence: Synthetic oligonucleotide
ggccgcacccggccggagg

SEQ ID NO: 368 - DNA, 19 bp, Artificial Sequence
  Description of Artificial Sequence: Synthetic oligonucleotide
gccgcacccggccggaggc

SEQ ID NO: 369 - DNA, 19 bp, Artificial Sequence
  Description of Artificial Sequence: Synthetic oligonucleotide
ccgcacccggccggaggcg

SEQ ID NO: 370 - DNA, 19 bp, Artificial Sequence
  Description of Artificial Sequence: Synthetic oligonucleotide
cgcacccggccggaggcgg

SEQ ID NO: 371 - DNA, 19 bp, Artificial Sequence
  Description of Artificial Sequence: Synthetic oligonucleotide
gcacccggccggaggcgga

SEQ ID NO: 372 - DNA, 19 bp, Artificial Sequence
  Description of Artificial Sequence: Synthetic oligonucleotide
cacccggccggaggcggag

SEQ ID NO: 373 - DNA, 19 bp, Artificial Sequence
  Description of Artificial Sequence: Synthetic oligonucleotide
acccggccggaggcggagg

SEQ ID NO: 374 - DNA, 19 bp, Artificial Sequence
  Description of Artificial Sequence: Synthetic oligonucleotide
cccggccggaggcggaggg

SEQ ID NO: 375 - DNA, 19 bp, Artificial Sequence
  Description of Artificial Sequence: Synthetic oligonucleotide
ccggccggaggcggagggc

SEQ ID NO: 376 - DNA, 19 bp, Artificial Sequence
  Description of Artificial Sequence: Synthetic oligonucleotide
cggccggaggcggagggca

SEQ ID NO: 377 - DNA, 19 bp, Artificial Sequence
  Description of Artificial Sequence: Synthetic oligonucleotide
ggccggaggcggagggcag

SEQ ID NO: 378 - DNA, 19 bp, Artificial Sequence
  Description of Artificial Sequence: Synthetic oligonucleotide
gccggaggcggagggcaga

SEQ ID NO: 379 - DNA, 19 bp, Artificial Sequence
  Description of Artificial Sequence: Synthetic oligonucleotide
ccggaggcggagggcagag

SEQ ID NO: 380 - DNA, 19 bp, Artificial Sequence
  Description of Artificial Sequence: Synthetic oligonucleotide
cggaggcggagggcagagc

SEQ ID NO: 381 - DNA, 19 bp, Artificial Sequence
  Description of Artificial Sequence: Synthetic oligonucleotide
ggaggcggagggcagagcg

SEQ ID NO: 382 - DNA, 19 bp, Artificial Sequence
  Description of Artificial Sequence: Synthetic oligonucleotide
gaggcggagggcagagcgc

SEQ ID NO: 383 - DNA, 19 bp, Artificial Sequence
  Description of Artificial Sequence: Synthetic oligonucleotide
aggcggagggcagagcgcg

SEQ ID NO: 384 - DNA, 19 bp, Artificial Sequence
  Description of Artificial Sequence: Synthetic oligonucleotide
ggcggagggcagagcgcgc

SEQ ID NO: 385 - DNA, 19 bp, Artificial Sequence
  Description of Artificial Sequence: Synthetic oligonucleotide
gcggagggcagagcgcgcg

SEQ ID NO: 386 - DNA, 19 bp, Artificial Sequence
  Description of Artificial Sequence: Synthetic oligonucleotide
cggagggcagagcgcgcgc

SEQ ID NO: 387 - DNA, 19 bp, Artificial Sequence
  Description of Artificial Sequence: Synthetic oligonucleotide
ggagggcagagcgcgcgcc

SEQ ID NO: 388 - DNA, 19 bp, Artificial Sequence
  Description of Artificial Sequence: Synthetic oligonucleotide
gagggcagagcgcgcgccc

SEQ ID NO: 389 - DNA, 19 bp, Artificial Sequence
  Description of Artificial Sequence: Synthetic oligonucleotide
agggcagagcgcgcgccca

SEQ ID NO: 390 - DNA, 19 bp, Artificial Sequence
  Description of Artificial Sequence: Synthetic oligonucleotide
gggcagagcgcgcgcccag

SEQ ID NO: 391 - DNA, 19 bp, Artificial Sequence
  Description of Artificial Sequence: Synthetic oligonucleotide
ggcagagcgcgcgcccagt

SEQ ID NO: 392 - DNA, 19 bp, Artificial Sequence
  Description of Artificial Sequence: Synthetic oligonucleotide
gcagagcgcgcgcccagtt

SEQ ID NO: 393 - DNA, 19 bp, Artificial Sequence
  Description of Artificial Sequence: Synthetic oligonucleotide
cagagcgcgcgcccagttg

SEQ ID NO: 394 - DNA, 19 bp, Artificial Sequence
  Description of Artificial Sequence: Synthetic oligonucleotide
agagcgcgcgcccagttgc

SEQ ID NO: 395 - DNA, 19 bp, Artificial Sequence
  Description of Artificial Sequence: Synthetic oligonucleotide
gagcgcgcgcccagttgcc

SEQ ID NO: 396 - DNA, 19 bp, Artificial Sequence
  Description of Artificial Sequence: Synthetic oligonucleotide
agcgcgcgcccagttgccc

SEQ ID NO: 397 - DNA, 19 bp, Artificial Sequence
  Description of Artificial Sequence: Synthetic oligonucleotide
gcgcgcgcccagttgcccg

SEQ ID NO: 398 - DNA, 19 bp, Artificial Sequence
  Description of Artificial Sequence: Synthetic oligonucleotide
cgcgcgcccagttgcccgg

SEQ ID NO: 399 - DNA, 19 bp, Artificial Sequence
  Description of Artificial Sequence: Synthetic oligonucleotide
gcgcgcccagttgcccggg

SEQ ID NO: 400 - DNA, 19 bp, Artificial Sequence
  Description of Artificial Sequence: Synthetic oligonucleotide
cgcgcccagttgcccgggc

SEQ ID NO: 401 - DNA, 19 bp, Artificial Sequence
  Description of Artificial Sequence: Synthetic oligonucleotide
gcgcccagttgcccgggca

SEQ ID NO: 402 - DNA, 19 bp, Artificial Sequence
  Description of Artificial Sequence: Synthetic oligonucleotide
cgcccagttgcccgggcac

SEQ ID NO: 403 - DNA, 19 bp, Artificial Sequence
  Description of Artificial Sequence: Synthetic oligonucleotide
gcccagttgcccgggcacc

SEQ ID NO: 404 - DNA, 19 bp, Artificial Sequence
  Description of Artificial Sequence: Synthetic oligonucleotide
cccagttgcccgggcacca

SEQ ID NO: 405 - DNA, 19 bp, Artificial Sequence
  Description of Artificial Sequence: Synthetic oligonucleotide
ccagttgcccgggcaccaa

SEQ ID NO: 406 - DNA, 19 bp, Artificial Sequence
  Description of Artificial Sequence: Synthetic oligonucleotide
cagttgcccgggcaccaaa

SEQ ID NO: 407 - DNA, 19 bp, Artificial Sequence
  Description of Artificial Sequence: Synthetic oligonucleotide
agttgcccgggcaccaaat

SEQ ID NO: 408 - DNA, 19 bp, Artificial Sequence
  Description of Artificial Sequence: Synthetic oligonucleotide
gttgcccgggcaccaaatc

SEQ ID NO: 409 - DNA, 19 bp, Artificial Sequence
  Description of Artificial Sequence: Synthetic oligonucleotide
ttgcccgggcaccaaatcg

SEQ ID NO: 410 - DNA, 19 bp, Artificial Sequence
  Description of Artificial Sequence: Synthetic oligonucleotide
tgcccgggcaccaaatcgg

SEQ ID NO: 411 - DNA, 19 bp, Artificial Sequence
  Description of Artificial Sequence: Synthetic oligonucleotide
gcccgggcaccaaatcgga

SEQ ID NO: 412 - DNA, 19 bp, Artificial Sequence
  Description of Artificial Sequence: Synthetic oligonucleotide
cccgggcaccaaatcggag

SEQ ID NO: 413 - DNA, 19 bp, Artificial Sequence
  Description of Artificial Sequence: Synthetic oligonucleotide
ccgggcaccaaatcggagc

SEQ ID NO: 414 - DNA, 19 bp, Artificial Sequence
  Description of Artificial Sequence: Synthetic oligonucleotide
cgggcaccaaatcggagcg

SEQ ID NO: 415 - DNA, 19 bp, Artificial Sequence
  Description of Artificial Sequence: Synthetic oligonucleotide
gggcaccaaatcggagcgc

SEQ ID NO: 416 - DNA, 19 bp, Artificial Sequence
  Description of Artificial Sequence: Synthetic oligonucleotide
ggcaccaaatcggagcgcg

SEQ ID NO: 417 - DNA, 19 bp, Artificial Sequence
  Description of Artificial Sequence: Synthetic oligonucleotide
gcaccaaatcggagcgcgg

SEQ ID NO: 418 - DNA, 19 bp, Artificial Sequence
  Description of Artificial Sequence: Synthetic oligonucleotide
caccaaatcggagcgcggc

SEQ ID NO: 419 - DNA, 19 bp, Artificial Sequence
  Description of Artificial Sequence: Synthetic oligonucleotide
accaaatcggagcgcggcg

SEQ ID NO: 420 - DNA, 19 bp, Artificial Sequence
  Description of Artificial Sequence: Synthetic oligonucleotide
ccaaatcggagcgcggcgt

SEQ ID NO: 421 - DNA, 19 bp, Artificial Sequence
  Description of Artificial Sequence: Synthetic oligonucleotide
caaatcggagcgcggcgtg

SEQ ID NO: 422 - DNA, 19 bp, Artificial Sequence
  Description of Artificial Sequence: Synthetic oligonucleotide
aaatcggagcgcggcgtgc

SEQ ID NO: 423 - DNA, 19 bp, Artificial Sequence
  Description of Artificial Sequence: Synthetic oligonucleotide
aatcggagcgcggcgtgcg

SEQ ID NO: 424 - DNA, 19 bp, Artificial Sequence
  Description of Artificial Sequence: Synthetic oligonucleotide
atcggagcgcggcgtgcgg

SEQ ID NO: 425 - DNA, 19 bp, Artificial Sequence
  Description of Artificial Sequence: Synthetic oligonucleotide
tcggagcgcggcgtgcggg

SEQ ID NO: 426 - DNA, 19 bp, Artificial Sequence
  Description of Artificial Sequence: Synthetic oligonucleotide
cggagcgcggcgtgcggga

SEQ ID NO: 427 - DNA, 19 bp, Artificial Sequence
  Description of Artificial Sequence: Synthetic oligonucleotide
ggagcgcggcgtgcgggag

SEQ ID NO: 428 - DNA, 19 bp, Artificial Sequence
  Description of Artificial Sequence: Synthetic oligonucleotide
gagcgcggcgtgcgggagg

SEQ ID NO: 429 - DNA, 19 bp, Artificial Sequence
  Description of Artificial Sequence: Synthetic oligonucleotide
agcgcggcgtgcgggaggc

SEQ ID NO: 430 - DNA, 19 bp, Artificial Sequence
  Description of Artificial Sequence: Synthetic oligonucleotide
gcgcggcgtgcgggaggcc

SEQ ID NO: 431 - DNA, 19 bp, Artificial Sequence
  Description of Artificial Sequence: Synthetic oligonucleotide
cgcggcgtgcgggaggccc

SEQ ID NO: 432 - DNA, 19 bp, Artificial Sequence
  Description of Artificial Sequence: Synthetic oligonucleotide
gcggcgtgcgggaggcccc

SEQ ID NO: 433 - DNA, 19 bp, Artificial Sequence
  Description of Artificial Sequence: Synthetic oligonucleotide
cggcgtgcgggaggcccca

SEQ ID NO: 434 - DNA, 19 bp, Artificial Sequence
  Description of Artificial Sequence: Synthetic oligonucleotide
ggcgtgcgggaggccccag

SEQ ID NO: 435 - DNA, 19 bp, Artificial Sequence
  Description of Artificial Sequence: Synthetic oligonucleotide
gcgtgcgggaggccccaga

SEQ ID NO: 436 - DNA, 19 bp, Artificial Sequence
  Description of Artificial Sequence: Synthetic oligonucleotide
cgtgcgggaggccccagag

SEQ ID NO: 437 - DNA, 19 bp, Artificial Sequence
  Description of Artificial Sequence: Synthetic oligonucleotide
gtgcgggaggccccagagc

SEQ ID NO: 438 - DNA, 19 bp, Artificial Sequence
  Description of Artificial Sequence: Synthetic oligonucleotide
tgcgggaggccccagagca

SEQ ID NO: 439 - DNA, 19 bp, Artificial Sequence
  Description of Artificial Sequence: Synthetic oligonucleotide
gcgggaggccccagagcag

SEQ ID NO: 440 - DNA, 19 bp, Artificial Sequence
  Description of Artificial Sequence: Synthetic oligonucleotide
cgggaggccccagagcagg

SEQ ID NO: 441 - DNA, 19 bp, Artificial Sequence
  Description of Artificial Sequence: Synthetic oligonucleotide
gggaggccccagagcagga

SEQ ID NO: 442 - DNA, 19 bp, Artificial Sequence
  Description of Artificial Sequence: Synthetic oligonucleotide
ggaggccccagagcaggac

SEQ ID NO: 443 - DNA, 19 bp, Artificial Sequence
  Description of Artificial Sequence: Synthetic oligonucleotide
gaggccccagagcaggact

SEQ ID NO: 444 - DNA, 19 bp, Artificial Sequence
  Description of Artificial Sequence: Synthetic oligonucleotide
aggccccagagcaggactg

SEQ ID NO: 445 - DNA, 19 bp, Artificial Sequence
  Description of Artificial Sequence: Synthetic oligonucleotide
ggccccagagcaggactgg

SEQ ID NO: 446 - DNA, 19 bp, Artificial Sequence
  Description of Artificial Sequence: Synthetic oligonucleotide
gccccagagcaggactgga

SEQ ID NO: 447 - DNA, 19 bp, Artificial Sequence
  Description of Artificial Sequence: Synthetic oligonucleotide
ccccagagcaggactggaa

SEQ ID NO: 448 - DNA, 19 bp, Artificial Sequence
  Description of Artificial Sequence: Synthetic oligonucleotide
cccagagcaggactggaaa

SEQ ID NO: 449 - DNA, 19 bp, Artificial Sequence
  Description of Artificial Sequence: Synthetic oligonucleotide
ccagagcaggactggaaat

SEQ ID NO: 450 - DNA, 19 bp, Artificial Sequence
  Description of Artificial Sequence: Synthetic oligonucleotide
cagagcaggactggaaatg

SEQ ID NO: 451 - DNA, 19 bp, Artificial Sequence
  Description of Artificial Sequence: Synthetic oligonucleotide
agagcaggactggaaatgt

SEQ ID NO: 452 - DNA, 19 bp, Artificial Sequence
  Description of Artificial Sequence: Synthetic oligonucleotide
gagcaggactggaaatgtc

SEQ ID NO: 453 - DNA, 19 bp, Artificial Sequence
  Description of Artificial Sequence: Synthetic oligonucleotide
agcaggactggaaatgtcc

SEQ ID NO: 454 - DNA, 19 bp, Artificial Sequence
  Description of Artificial Sequence: Synthetic oligonucleotide
gcaggactggaaatgtcct

SEQ ID NO: 455 - DNA, 19 bp, Artificial Sequence
  Description of Artificial Sequence: Synthetic oligonucleotide
caggactggaaatgtcctg

SEQ ID NO: 456 - DNA, 19 bp, Artificial Sequence
  Description of Artificial Sequence: Synthetic oligonucleotide
aggactggaaatgtcctgg

SEQ ID NO: 457 - DNA, 19 bp, Artificial Sequence
  Description of Artificial Sequence: Synthetic oligonucleotide
ggactggaaatgtcctggc

SEQ ID NO: 458 - DNA, 19 bp, Artificial Sequence
  Description of Artificial Sequence: Synthetic oligonucleotide
gactggaaatgtcctggcc

SEQ ID NO: 459 - DNA, 19 bp, Artificial Sequence
  Description of Artificial Sequence: Synthetic oligonucleotide
actggaaatgtcctggccg

SEQ ID NO: 460 - DNA, 19 bp, Artificial Sequence
  Description of Artificial Sequence: Synthetic oligonucleotide
ctggaaatgtcctggccgc

SEQ ID NO: 461 - DNA, 19 bp, Artificial Sequence
  Description of Artificial Sequence: Synthetic oligonucleotide
tggaaatgtcctggccgcg

SEQ ID NO: 462 - DNA, 19 bp, Artificial Sequence
  Description of Artificial Sequence: Synthetic oligonucleotide
ggaaatgtcctggccgcgc

SEQ ID NO: 463 - DNA, 19 bp, Artificial Sequence
  Description of Artificial Sequence: Synthetic oligonucleotide
gaaatgtcctggccgcgcc

SEQ ID NO: 464 - DNA, 19 bp, Artificial Sequence
  Description of Artificial Sequence: Synthetic oligonucleotide
aaatgtcctggccgcgccg

SEQ ID NO: 465 - DNA, 19 bp, Artificial Sequence
  Description of Artificial Sequence: Synthetic oligonucleotide
aatgtcctggccgcgccgc

SEQ ID NO: 466 - DNA, 19 bp, Artificial Sequence
  Description of Artificial Sequence: Synthetic oligonucleotide
atgtcctggccgcgccgcc

SEQ ID NO: 467 - DNA, 19 bp, Artificial Sequence
  Description of Artificial Sequence: Synthetic oligonucleotide
tgtcctggccgcgccgcct

SEQ ID NO: 468 - DNA, 19 bp, Artificial Sequence
  Description of Artificial Sequence: Synthetic oligonucleotide
gtcctggccgcgccgcctc

SEQ ID NO: 469 - DNA, 19 bp, Artificial Sequence
  Description of Artificial Sequence: Synthetic oligonucleotide
tcctggccgcgccgcctcc

SEQ ID NO: 470 - DNA, 19 bp, Artificial Sequence
  Description of Artificial Sequence: Synthetic oligonucleotide
cctggccgcgccgcctcct

SEQ ID NO: 471 - DNA, 19 bp, Artificial Sequence
  Description of Artificial Sequence: Synthetic oligonucleotide
ctggccgcgccgcctcctg

SEQ ID NO: 472 - DNA, 19 bp, Artificial Sequence
  Description of Artificial Sequence: Synthetic oligonucleotide
tggccgcgccgcctcctgc

SEQ ID NO: 473 - DNA, 19 bp, Artificial Sequence
  Description of Artificial Sequence: Synthetic oligonucleotide
ggccgcgccgcctcctgct

SEQ ID NO: 474 - DNA, 19 bp, Artificial Sequence
  Description of Artificial Sequence: Synthetic oligonucleotide
gccgcgccgcctcctgctc

SEQ ID NO: 475 - DNA, 19 bp, Artificial Sequence
  Description of Artificial Sequence: Synthetic oligonucleotide
ccgcgccgcctcctgctca

SEQ ID NO: 476 - DNA, 19 bp, Artificial Sequence
  Description of Artificial Sequence: Synthetic oligonucleotide
cgcgccgcctcctgctcag

SEQ ID NO: 477 - DNA, 19 bp, Artificial Sequence
  Description of Artificial Sequence: Synthetic oligonucleotide
gcgccgcctcctgctcaga

SEQ ID NO: 478 - DNA, 19 bp, Artificial Sequence
  Description of Artificial Sequence: Synthetic oligonucleotide
cgccgcctcctgctcagat

SEQ ID NO: 479 - DNA, 19 bp, Artificial Sequence
  Description of Artificial Sequence: Synthetic oligonucleotide
gccgcctcctgctcagata

SEQ ID NO: 480 - DNA, 19 bp, Artificial Sequence
  Description of Artificial Sequence: Synthetic oligonucleotide
ccgcctcctgctcagatac

SEQ ID NO: 481 - DNA, 19 bp, Artificial Sequence
  Description of Artificial Sequence: Synthetic oligonucleotide
cgcctcctgctcagatacc

SEQ ID NO: 482 - DNA, 19 bp, Artificial Sequence
  Description of Artificial Sequence: Synthetic oligonucleotide
gcctcctgctcagatacct

SEQ ID NO: 483 - DNA, 19 bp, Artificial Sequence
  Description of Artificial Sequence: Synthetic oligonucleotide
cctcctgctcagatacctg

SEQ ID NO: 484 - DNA, 19 bp, Artificial Sequence
  Description of Artificial Sequence: Synthetic oligonucleotide
ctcctgctcagatacctgt

SEQ ID NO: 485 - DNA, 19 bp, Artificial Sequence
  Description of Artificial Sequence: Synthetic oligonucleotide
tcctgctcagatacctgtt

SEQ ID NO: 486 - DNA, 19 bp, Artificial Sequence
  Description of Artificial Sequence: Synthetic oligonucleotide
cctgctcagatacctgttc

SEQ ID NO: 487 - DNA, 19 bp, Artificial Sequence
  Description of Artificial Sequence: Synthetic oligonucleotide
ctgctcagatacctgttcc

SEQ ID NO: 488 - DNA, 19 bp, Artificial Sequence
  Description of Artificial Sequence: Synthetic oligonucleotide
tgctcagatacctgttccc

SEQ ID NO: 489 - DNA, 19 bp, Artificial Sequence
  Description of Artificial Sequence: Synthetic oligonucleotide
gctcagatacctgttcccg

SEQ ID NO: 490 - DNA, 19 bp, Artificial Sequence
  Description of Artificial Sequence: Synthetic oligonucleotide
ctcagatacctgttcccgg

SEQ ID NO: 491 - DNA, 19 bp, Artificial Sequence
  Description of Artificial Sequence: Synthetic oligonucleotide
tcagatacctgttcccggc

SEQ ID NO: 492 - DNA, 19 bp, Artificial Sequence
  Description of Artificial Sequence: Synthetic oligonucleotide
cagatacctgttcccggcc

SEQ ID NO: 493 - DNA, 19 bp, Artificial Sequence
  Description of Artificial Sequence: Synthetic oligonucleotide
agatacctgttcccggccc

SEQ ID NO: 494 - DNA, 19 bp, Artificial Sequence
  Description of Artificial Sequence: Synthetic oligonucleotide
gatacctgttcccggccct

SEQ ID NO: 495 - DNA, 19 bp, Artificial Sequence
  Description of Artificial Sequence: Synthetic oligonucleotide
atacctgttcccggccctc

SEQ ID NO: 496 - DNA, 19 bp, Artificial Sequence
  Description of Artificial Sequence: Synthetic oligonucleotide
tacctgttcccggccctcc

SEQ ID NO: 497 - DNA, 19 bp, Artificial Sequence
  Description of Artificial Sequence: Synthetic oligonucleotide
acctgttcccggccctcct

SEQ ID NO: 498 - DNA, 19 bp, Artificial Sequence
  Description of Artificial Sequence: Synthetic oligonucleotide
cctgttcccggccctcctg

SEQ ID NO: 499 - DNA, 19 bp, Artificial Sequence
  Description of Artificial Sequence: Synthetic oligonucleotide
ctgttcccggccctcctgc

SEQ ID NO: 500 - DNA, 19 bp, Artificial Sequence
  Description of Artificial Sequence: Synthetic oligonucleotide
tgttcccggccctcctgct

SEQ ID NO: 501 - DNA, 19 bp, Artificial Sequence
  Description of Artificial Sequence: Synthetic oligonucleotide
gttcccggccctcctgctt

SEQ ID NO: 502 - DNA, 19 bp, Artificial Sequence
  Description of Artificial Sequence: Synthetic oligonucleotide
ttcccggccctcctgcttc

SEQ ID NO: 503 - DNA, 19 bp, Artificial Sequence
  Description of Artificial Sequence: Synthetic oligonucleotide
tcccggccctcctgcttca

SEQ ID NO: 504 - DNA, 19 bp, Artificial Sequence
  Description of Artificial Sequence: Synthetic oligonucleotide
cccggccctcctgcttcac

SEQ ID NO: 505 - DNA, 19 bp, Artificial Sequence
  Description of Artificial Sequence: Synthetic oligonucleotide
ccggccctcctgcttcacg

SEQ ID NO: 506 - DNA, 19 bp, Artificial Sequence
  Description of Artificial Sequence: Synthetic oligonucleotide
cggccctcctgcttcacgg

SEQ ID NO: 507 - DNA, 19 bp, Artificial Sequence
  Description of Artificial Sequence: Synthetic oligonucleotide
ggccctcctgcttcacggg

SEQ ID NO: 508 - DNA, 19 bp, Artificial Sequence
  Description of Artificial Sequence: Synthetic oligonucleotide
gccctcctgcttcacgggc

SEQ ID NO: 509 - DNA, 19 bp, Artificial Sequence
  Description of Artificial Sequence: Synthetic oligonucleotide
ccctcctgcttcacgggct

SEQ ID NO: 510 - DNA, 19 bp, Artificial Sequence
  Description of Artificial Sequence: Synthetic oligonucleotide
cctcctgcttcacgggctg

SEQ ID NO: 511 - DNA, 19 bp, Artificial Sequence
  Description of Artificial Sequence: Synthetic oligonucleotide
ctcctgcttcacgggctgg

SEQ ID NO: 512 - DNA, 19 bp, Artificial Sequence
  Description of Artificial Sequence: Synthetic oligonucleotide
tcctgcttcacgggctggg

SEQ ID NO: 513 - DNA, 19 bp, Artificial Sequence
  Description of Artificial Sequence: Synthetic oligonucleotide
cctgcttcacgggctggga

SEQ ID NO: 514 - DNA, 19 bp, Artificial Sequence
  Description of Artificial Sequence: Synthetic oligonucleotide
ctgcttcacgggctgggag

SEQ ID NO: 515 - DNA, 19 bp, Artificial Sequence
  Description of Artificial Sequence: Synthetic oligonucleotide
tgcttcacgggctgggaga

SEQ ID NO: 516 - DNA, 19 bp, Artificial Sequence
  Description of Artificial Sequence: Synthetic oligonucleotide
gcttcacgggctgggagag

SEQ ID NO: 517 - DNA, 19 bp, Artificial Sequence
  Description of Artificial Sequence: Synthetic oligonucleotide
cttcacgggctgggagagg

SEQ ID NO: 518 - DNA, 19 bp, Artificial Sequence
  Description of Artificial Sequence: Synthetic oligonucleotide
ttcacgggctgggagaggg

SEQ ID NO: 519 - DNA, 19 bp, Artificial Sequence
  Description of Artificial Sequence: Synthetic oligonucleotide
tcacgggctgggagagggt

SEQ ID NO: 520 - DNA, 19 bp, Artificial Sequence
  Description of Artificial Sequence: Synthetic oligonucleotide
cacgggctgggagagggtt

SEQ ID NO: 521 - DNA, 19 bp, Artificial Sequence
  Description of Artificial Sequence: Synthetic oligonucleotide
acgggctgggagagggttc

SEQ ID NO: 522 - DNA, 19 bp, Artificial Sequence
  Description of Artificial Sequence: Synthetic oligonucleotide
cgggctgggagagggttct

SEQ ID NO: 523 - DNA, 19 bp, Artificial Sequence
  Description of Artificial Sequence: Synthetic oligonucleotide
gggctgggagagggttctg

SEQ ID NO: 524 - DNA, 19 bp, Artificial Sequence
  Description of Artificial Sequence: Synthetic oligonucleotide
ggctgggagagggttctgc

SEQ ID NO: 525 - DNA, 19 bp, Artificial Sequence
  Description of Artificial Sequence: Synthetic oligonucleotide
gctgggagagggttctgcc

SEQ ID NO: 526 - DNA, 19 bp, Artificial Sequence
  Description of Artificial Sequence: Synthetic oligonucleotide
ctgggagagggttctgccc

SEQ ID NO: 527 - DNA, 19 bp, Artificial Sequence
  Description of Artificial Sequence: Synthetic oligonucleotide
tgggagagggttctgccct

SEQ ID NO: 528 - DNA, 19 bp, Artificial Sequence
  Description of Artificial Sequence: Synthetic oligonucleotide
gggagagggttctgccctc

SEQ ID NO: 529 - DNA, 19 bp, Artificial Sequence
  Description of Artificial Sequence: Synthetic oligonucleotide
ggagagggttctgccctcc

SEQ ID NO: 530 - DNA, 19 bp, Artificial Sequence
  Description of Artificial Sequence: Synthetic oligonucleotide
gagagggttctgccctcct

SEQ ID NO: 531 - DNA, 19 bp, Artificial Sequence
  Description of Artificial Sequence: Synthetic oligonucleotide
agagggttctgccctcctt

SEQ ID NO: 532 - DNA, 19 bp, Artificial Sequence
  Description of Artificial Sequence: Synthetic oligonucleotide
gagggttctgccctccttc

SEQ ID NO: 533 - DNA, 19 bp, Artificial Sequence
  Description of Artificial Sequence: Synthetic oligonucleotide
agggttctgccctccttca

SEQ ID NO: 534 - DNA, 19 bp, Artificial Sequence
  Description of Artificial Sequence: Synthetic oligonucleotide
gggttctgccctccttcat

SEQ ID NO: 535 - DNA, 19 bp, Artificial Sequence
  Description of Artificial Sequence: Synthetic oligonucleotide
ggttctgccctccttcatc

SEQ ID NO: 536 - DNA, 19 bp, Artificial Sequence
  Description of Artificial Sequence: Synthetic oligonucleotide
gttctgccctccttcatcc

SEQ ID NO: 537 - DNA, 19 bp, Artificial Sequence
  Description of Artificial Sequence: Synthetic oligonucleotide
ttctgccctccttcatcca

SEQ ID NO: 538 - DNA, 19 bp, Artificial Sequence
  Description of Artificial Sequence: Synthetic oligonucleotide
tctgccctccttcatccag

SEQ ID NO: 539 - DNA, 19 bp, Artificial Sequence
  Description of Artificial Sequence: Synthetic oligonucleotide
ctgccctccttcatccaga

SEQ ID NO: 540 - DNA, 19 bp, Artificial Sequence
  Description of Artificial Sequence: Synthetic oligonucleotide
tgccctccttcatccagac

SEQ ID NO: 541 - DNA, 19 bp, Artificial Sequence
  Description of Artificial Sequence: Synthetic oligonucleotide
gccctccttcatccagaca

SEQ ID NO: 542 - DNA, 19 bp, Artificial Sequence
  Description of Artificial Sequence: Synthetic oligonucleotide
ccctccttcatccagacag

SEQ ID NO: 543 - DNA, 19 bp, Artificial Sequence
  Description of Artificial Sequence: Synthetic oligonucleotide
cctccttcatccagacagc

SEQ ID NO: 544 - DNA, 19 bp, Artificial Sequence
  Description of Artificial Sequence: Synthetic oligonucleotide
ctccttcatccagacagca

SEQ ID NO: 545 - DNA, 19 bp, Artificial Sequence
  Description of Artificial Sequence: Synthetic oligonucleotide
tccttcatccagacagcag

SEQ ID NO: 546 - DNA, 19 bp, Artificial Sequence
  Description of Artificial Sequence: Synthetic oligonucleotide
ccttcatccagacagcagg

SEQ ID NO: 547 - DNA, 19 bp, Artificial Sequence
  Description of Artificial Sequence: Synthetic oligonucleotide
cttcatccagacagcaggt

SEQ ID NO: 548 - DNA, 19 bp, Artificial Sequence
  Description of Artificial Sequence: Synthetic oligonucleotide
ttcatccagacagcaggtc

SEQ ID NO: 549 - DNA, 19 bp, Artificial Sequence
  Description of Artificial Sequence: Synthetic oligonucleotide
tcatccagacagcaggtct

SEQ ID NO: 550 - DNA, 19 bp, Artificial Sequence
  Description of Artificial Sequence: Synthetic oligonucleotide
catccagacagcaggtctc

SEQ ID NO: 551 - DNA, 19 bp, Artificial Sequence
  Description of Artificial Sequence: Synthetic oligonucleotide
atccagacagcaggtctca

SEQ ID NO: 552 - DNA, 19 bp, Artificial Sequence
  Description of Artificial Sequence: Synthetic oligonucleotide
tccagacagcaggtctcat

SEQ ID NO: 553 - DNA, 19 bp, Artificial Sequence
  Description of Artificial Sequence: Synthetic oligonucleotide
ccagacagcaggtctcatc

SEQ ID NO: 554 - DNA, 19 bp, Artificial Sequence
  Description of Artificial Sequence: Synthetic oligonucleotide
cagacagcaggtctcatcc

SEQ ID NO: 555 - DNA, 19 bp, Artificial Sequence
  Description of Artificial Sequence: Synthetic oligonucleotide
agacagcaggtctcatcct

SEQ ID NO: 556 - DNA, 19 bp, Artificial Sequence
  Description of Artificial Sequence: Synthetic oligonucleotide
gacagcaggtctcatccta

SEQ ID NO: 557 - DNA, 19 bp, Artificial Sequence
  Description of Artificial Sequence: Synthetic oligonucleotide
acagcaggtctcatcctag

SEQ ID NO: 558 - DNA, 19 bp, Artificial Sequence
  Description of Artificial Sequence: Synthetic oligonucleotide
cagcaggtctcatcctagg

SEQ ID NO: 559 - DNA, 19 bp, Artificial Sequence
  Description of Artificial Sequence: Synthetic oligonucleotide
agcaggtctcatcctaggt

SEQ ID NO: 560 - DNA, 19 bp, Artificial Sequence
  Description of Artificial Sequence: Synthetic oligonucleotide
gcaggtctcatcctaggtc

SEQ ID NO: 561 - DNA, 19 bp, Artificial Sequence
  Description of Artificial Sequence: Synthetic oligonucleotide
caggtctcatcctaggtcc

SEQ ID NO: 562 - DNA, 19 bp, Artificial Sequence
  Description of Artificial Sequence: Synthetic oligonucleotide
aggtctcatcctaggtcct

SEQ ID NO: 563 - DNA, 19 bp, Artificial Sequence
  Description of Artificial Sequence: Synthetic oligonucleotide
ggtctcatcctaggtcctt

SEQ ID NO: 564 - DNA, 19 bp, Artificial Sequence
  Description of Artificial Sequence: Synthetic oligonucleotide
gtctcatcctaggtcctta

SEQ ID NO: 565 - DNA, 19 bp, Artificial Sequence
  Description of Artificial Sequence: Synthetic oligonucleotide
tctcatcctaggtccttag

SEQ ID NO: 566 - DNA, 19 bp, Artificial Sequence
  Description of Artificial Sequence: Synthetic oligonucleotide
ctcatcctaggtccttaga

SEQ ID NO: 567 - DNA, 19 bp, Artificial Sequence
  Description of Artificial Sequence: Synthetic oligonucleotide
tcatcctaggtccttagag

SEQ ID NO: 568 - DNA, 19 bp, Artificial Sequence
  Description of Artificial Sequence: Synthetic oligonucleotide
catcctaggtccttagaga

SEQ ID NO: 569 - DNA, 19 bp, Artificial Sequence
  Description of Artificial Sequence: Synthetic oligonucleotide
atcctaggtccttagagaa

SEQ ID NO: 570 - DNA, 19 bp, Artificial Sequence
  Description of Artificial Sequence: Synthetic oligonucleotide
tcctaggtccttagagaaa

SEQ ID NO: 571 - DNA, 19 bp, Artificial Sequence
  Description of Artificial Sequence: Synthetic oligonucleotide
cctaggtccttagagaaaa

SEQ ID NO: 572 - DNA, 19 bp, Artificial Sequence
  Description of Artificial Sequence: Synthetic oligonucleotide
ctaggtccttagagaaaag

SEQ ID NO: 573 - DNA, 19 bp, Artificial Sequence
  Description of Artificial Sequence: Synthetic oligonucleotide
taggtccttagagaaaagt

SEQ ID NO: 574 - DNA, 19 bp, Artificial Sequence
  Description of Artificial Sequence: Synthetic oligonucleotide
aggtccttagagaaaagtg

SEQ ID NO: 575 - DNA, 19 bp, Artificial Sequence
  Description of Artificial Sequence: Synthetic oligonucleotide
ggtccttagagaaaagtgc

SEQ ID NO: 576 - DNA, 19 bp, Artificial Sequence
  Description of Artificial Sequence: Synthetic oligonucleotide
gtccttagagaaaagtgcc

SEQ ID NO: 577 - DNA, 19 bp, Artificial Sequence
  Description of Artificial Sequence: Synthetic oligonucleotide
tccttagagaaaagtgcct

SEQ ID NO: 578 - DNA, 19 bp, Artificial Sequence
  Description of Artificial Sequence: Synthetic oligonucleotide
ccttagagaaaagtgcctg

SEQ ID NO: 579 - DNA, 19 bp, Artificial Sequence
  Description of Artificial Sequence: Synthetic oligonucleotide
cttagagaaaagtgcctgg

SEQ ID NO: 580 - DNA, 19 bp, Artificial Sequence
  Description of Artificial Sequence: Synthetic oligonucleotide
ttagagaaaagtgcctgga

SEQ ID NO: 581 - DNA, 19 bp, Artificial Sequence
  Description of Artificial Sequence: Synthetic oligonucleotide
tagagaaaagtgcctggag

SEQ ID NO: 582 - DNA, 19 bp, Artificial Sequence
  Description of Artificial Sequence: Synthetic oligonucleotide
agagaaaagtgcctggagg

SEQ ID NO: 583 - DNA, 19 bp, Artificial Sequence
  Description of Artificial Sequence: Synthetic oligonucleotide
gagaaaagtgcctggaggg

SEQ ID NO: 584 - DNA, 19 bp, Artificial Sequence
  Description of Artificial Sequence: Synthetic oligonucleotide
agaaaagtgcctggagggc

SEQ ID NO: 585 - DNA, 19 bp, Artificial Sequence
  Description of Artificial Sequence: Synthetic oligonucleotide
gaaaagtgcctggagggct

SEQ ID NO: 586 - DNA, 19 bp, Artificial Sequence
  Description of Artificial Sequence: Synthetic oligonucleotide
aaaagtgcctggagggctt

SEQ ID NO: 587 - DNA, 19 bp, Artificial Sequence
  Description of Artificial Sequence: Synthetic oligonucleotide
aaagtgcctggagggcttt

SEQ ID NO: 588 - DNA, 19 bp, Artificial Sequence
  Description of Artificial Sequence: Synthetic oligonucleotide
aagtgcctggagggctttt

SEQ ID NO: 589 - DNA, 19 bp, Artificial Sequence
  Description of Artificial Sequence: Synthetic oligonucleotide
agtgcctggagggctttta

SEQ ID NO: 590 - DNA, 19 bp, Artificial Sequence
  Description of Artificial Sequence: Synthetic oligonucleotide
gtgcctggagggcttttaa

SEQ ID NO: 591 - DNA, 19 bp, Artificial Sequence
  Description of Artificial Sequence: Synthetic oligonucleotide
tgcctggagggcttttaag

SEQ ID NO: 592 - DNA, 19 bp, Artificial Sequence
  Description of Artificial Sequence: Synthetic oligonucleotide
gcctggagggcttttaagg

SEQ ID NO: 593 - DNA, 19 bp, Artificial Sequence
  Description of Artificial Sequence: Synthetic oligonucleotide
cctggagggcttttaagga

SEQ ID NO: 594 - DNA, 19 bp, Artificial Sequence
  Description of Artificial Sequence: Synthetic oligonucleotide
ctggagggcttttaaggag

SEQ ID NO: 595 - DNA, 19 bp, Artificial Sequence
  Description of Artificial Sequence: Synthetic oligonucleotide
tggagggcttttaaggagt

SEQ ID NO: 596 - DNA, 19 bp, Artificial Sequence
  Description of Artificial Sequence: Synthetic oligonucleotide
ggagggcttttaaggagtc

SEQ ID NO: 597 - DNA, 19 bp, Artificial Sequence
  Description of Artificial Sequence: Synthetic oligonucleotide
gagggcttttaaggagtca

SEQ ID NO: 598 - DNA, 19 bp, Artificial Sequence
  Description of Artificial Sequence: Synthetic oligonucleotide
agggcttttaaggagtcac

SEQ ID NO: 599 - DNA, 19 bp, Artificial Sequence
  Description of Artificial Sequence: Synthetic oligonucleotide
gggcttttaaggagtcaca

SEQ ID NO: 600 - DNA, 19 bp, Artificial Sequence
  Description of Artificial Sequence: Synthetic oligonucleotide
ggcttttaaggagtcacag

SEQ ID NO: 601 - DNA, 19 bp, Artificial Sequence
  Description of Artificial Sequence: Synthetic oligonucleotide
gcttttaaggagtcacagt

SEQ ID NO: 602 - DNA, 19 bp, Artificial Sequence
  Description of Artificial Sequence: Synthetic oligonucleotide
cttttaaggagtcacagtg

SEQ ID NO: 603 - DNA, 19 bp, Artificial Sequence
  Description of Artificial Sequence: Synthetic oligonucleotide
ttttaaggagtcacagtgc

SEQ ID NO: 604 - DNA, 19 bp, Artificial Sequence
  Description of Artificial Sequence: Synthetic oligonucleotide
tttaaggagtcacagtgcc

SEQ ID NO: 605 - DNA, 19 bp, Artificial Sequence
  Description of Artificial Sequence: Synthetic oligonucleotide
ttaaggagtcacagtgcca

SEQ ID NO: 606 - DNA, 19 bp, Artificial Sequence
  Description of Artificial Sequence: Synthetic oligonucleotide
taaggagtcacagtgccat

SEQ ID NO: 607 - DNA, 19 bp, Artificial Sequence
  Description of Artificial Sequence: Synthetic oligonucleotide
aaggagtcacagtgccatc

SEQ ID NO: 608 - DNA, 19 bp, Artificial Sequence
  Description of Artificial Sequence: Synthetic oligonucleotide
aggagtcacagtgccatca

SEQ ID NO: 609 - DNA, 19 bp, Artificial Sequence
  Description of Artificial Sequence: Synthetic oligonucleotide
ggagtcacagtgccatcac

SEQ ID NO: 610 - DNA, 19 bp, Artificial Sequence
  Description of Artificial Sequence: Synthetic oligonucleotide
gagtcacagtgccatcaca

SEQ ID NO: 611 - DNA, 19 bp, Artificial Sequence
  Description of Artificial Sequence: Synthetic oligonucleotide
agtcacagtgccatcacat

SEQ ID NO: 612 - DNA, 19 bp, Artificial Sequence
  Description of Artificial Sequence: Synthetic oligonucleotide
gtcacagtgccatcacatg

SEQ ID NO: 613 - DNA, 19 bp, Artificial Sequence
  Description of Artificial Sequence: Synthetic oligonucleotide
tcacagtgccatcacatgc

SEQ ID NO: 614 - DNA, 19 bp, Artificial Sequence
  Description of Artificial Sequence: Synthetic oligonucleotide
cacagtgccatcacatgct

SEQ ID NO: 615 - DNA, 19 bp, Artificial Sequence
  Description of Artificial Sequence: Synthetic oligonucleotide
acagtgccatcacatgctc

SEQ ID NO: 616 - DNA, 19 bp, Artificial Sequence
  Description of Artificial Sequence: Synthetic oligonucleotide
cagtgccatcacatgctca

SEQ ID NO: 617 - DNA, 19 bp, Artificial Sequence
  Description of Artificial Sequence: Synthetic oligonucleotide
agtgccatcacatgctcaa

SEQ ID NO: 618 - DNA, 19 bp, Artificial Sequence
  Description of Artificial Sequence: Synthetic oligonucleotide
gtgccatcacatgctcaaa

SEQ ID NO: 619 - DNA, 19 bp, Artificial Sequence
  Description of Artificial Sequence: Synthetic oligonucleotide
tgccatcacatgctcaaac

SEQ ID NO: 620 - DNA, 19 bp, Artificial Sequence
  Description of Artificial Sequence: Synthetic oligonucleotide
gccatcacatgctcaaaca

SEQ ID NO: 621 - DNA, 19 bp, Artificial Sequence
  Description of Artificial Sequence: Synthetic oligonucleotide
ccatcacatgctcaaacat

SEQ ID NO: 622 - DNA, 19 bp, Artificial Sequence
  Description of Artificial Sequence: Synthetic oligonucleotide
catcacatgctcaaacatc

SEQ ID NO: 623 - DNA, 19 bp, Artificial Sequence
  Description of Artificial Sequence: Synthetic oligonucleotide
atcacatgctcaaacatct

SEQ ID NO: 624 - DNA, 19 bp, Artificial Sequence
  Description of Artificial Sequence: Synthetic oligonucleotide
tcacatgctcaaacatctc

SEQ ID NO: 625 - DNA, 19 bp, Artificial Sequence
  Description of Artificial Sequence: Synthetic oligonucleotide
cacatgctcaaacatctcc

SEQ ID NO: 626 - DNA, 19 bp, Artificial Sequence
  Description of Artificial Sequence: Synthetic oligonucleotide
acatgctcaaacatctcca

SEQ ID NO: 627 - DNA, 19 bp, Artificial Sequence
  Description of Artificial Sequence: Synthetic oligonucleotide
catgctcaaacatctccac

SEQ ID NO: 628 - DNA, 19 bp, Artificial Sequence
  Description of Artificial Sequence: Synthetic oligonucleotide
atgctcaaacatctccaca

SEQ ID NO: 629 - DNA, 19 bp, Artificial Sequence
  Description of Artificial Sequence: Synthetic oligonucleotide
tgctcaaacatctccacaa

SEQ ID NO: 630 - DNA, 19 bp, Artificial Sequence
  Description of Artificial Sequence: Synthetic oligonucleotide
gctcaaacatctccacaat

SEQ ID NO: 631 - DNA, 19 bp, Artificial Sequence
  Description of Artificial Sequence: Synthetic oligonucleotide
ctcaaacatctccacaatg

SEQ ID NO: 632 - DNA, 19 bp, Artificial Sequence
  Description of Artificial Sequence: Synthetic oligonucleotide
tcaaacatctccacaatgg

SEQ ID NO: 633 - DNA, 19 bp, Artificial Sequence
  Description of Artificial Sequence: Synthetic oligonucleotide
caaacatctccacaatggt

SEQ ID NO: 634 - DNA, 19 bp, Artificial Sequence
  Description of Artificial Sequence: Synthetic oligonucleotide
aaacatctccacaatggtg

SEQ ID NO: 635 - DNA, 19 bp, Artificial Sequence
  Description of Artificial Sequence: Synthetic oligonucleotide
aacatctccacaatggtgc

SEQ ID NO: 636 - DNA, 19 bp, Artificial Sequence
  Description of Artificial Sequence: Synthetic oligonucleotide
acatctccacaatggtgca

SEQ ID NO: 637 - DNA, 19 bp, Artificial Sequence
  Description of Artificial Sequence: Synthetic oligonucleotide
catctccacaatggtgcaa

SEQ ID NO: 638 - DNA, 19 bp, Artificial Sequence
  Description of Artificial Sequence: Synthetic oligonucleotide
atctccacaatggtgcaag

SEQ ID NO: 639 - DNA, 19 bp, Artificial Sequence
  Description of Artificial Sequence: Synthetic oligonucleotide
tctccacaatggtgcaagg

SEQ ID NO: 640 - DNA, 19 bp, Artificial Sequence
  Description of Artificial Sequence: Synthetic oligonucleotide
ctccacaatggtgcaagga

SEQ ID NO: 641 - DNA, 19 bp, Artificial Sequence
  Description of Artificial Sequence: Synthetic oligonucleotide
tccacaatggtgcaaggat

SEQ ID NO: 642 - DNA, 19 bp, Artificial Sequence
  Description of Artificial Sequence: Synthetic oligonucleotide
ccacaatggtgcaaggatc

SEQ ID NO: 643 - DNA, 19 bp, Artificial Sequence
  Description of Artificial Sequence: Synthetic oligonucleotide
cacaatggtgcaaggatca

SEQ ID NO: 644 - DNA, 19 bp, Artificial Sequence
  Description of Artificial Sequence: Synthetic oligonucleotide
acaatggtgcaaggatcac

SEQ ID NO: 645 - DNA, 19 bp, Artificial Sequence
  Description of Artificial Sequence: Synthetic oligonucleotide
caatggtgcaaggatcaca

SEQ ID NO: 646 - DNA, 19 bp, Artificial Sequence
  Description of Artificial Sequence: Synthetic oligonucleotide
aatggtgcaaggatcacag

SEQ ID NO: 647 - DNA, 19 bp, Artificial Sequence
  Description of Artificial Sequence: Synthetic oligonucleotide
atggtgcaaggatcacagt

SEQ ID NO: 648 - DNA, 19 bp, Artificial Sequence
  Description of Artificial Sequence: Synthetic oligonucleotide
tggtgcaaggatcacagtg

SEQ ID NO: 649 - DNA, 19 bp, Artificial Sequence
  Description of Artificial Sequence: Synthetic oligonucleotide
ggtgcaaggatcacagtgc

SEQ ID NO: 650 - DNA, 19 bp, Artificial Sequence
  Description of Artificial Sequence: Synthetic oligonucleotide
gtgcaaggatcacagtgca

SEQ ID NO: 651 - DNA, 19 bp, Artificial Sequence
  Description of Artificial Sequence: Synthetic oligonucleotide
tgcaaggatcacagtgcag

SEQ ID NO: 652 - DNA, 19 bp, Artificial Sequence
  Description of Artificial Sequence: Synthetic oligonucleotide
gcaaggatcacagtgcaga

SEQ ID NO: 653 - DNA, 19 bp, Artificial Sequence
  Description of Artificial Sequence: Synthetic oligonucleotide
caaggatcacagtgcagat

SEQ ID NO: 654 - DNA, 19 bp, Artificial Sequence
  Description of Artificial Sequence: Synthetic oligonucleotide
aaggatcacagtgcagatg

SEQ ID NO: 655 - DNA, 19 bp, Artificial Sequence
  Description of Artificial Sequence: Synthetic oligonucleotide
aggatcacagtgcagatgc

SEQ ID NO: 656 - DNA, 19 bp, Artificial Sequence
  Description of Artificial Sequence: Synthetic oligonucleotide
ggatcacagtgcagatgcc

SEQ ID NO: 657 - DNA, 19 bp, Artificial Sequence
  Description of Artificial Sequence: Synthetic oligonucleotide
gatcacagtgcagatgcca

SEQ ID NO: 658 - DNA, 19 bp, Artificial Sequence
  Description of Artificial Sequence: Synthetic oligonucleotide
atcacagtgcagatgccac

SEQ ID NO: 659 - DNA, 19 bp, Artificial Sequence
  Description of Artificial Sequence: Synthetic oligonucleotide
tcacagtgcagatgccacc

SEQ ID NO: 660 - DNA, 19 bp, Artificial Sequence
  Description of Artificial Sequence: Synthetic oligonucleotide
cacagtgcagatgccacct

SEQ ID NO: 661 - DNA, 19 bp, Artificial Sequence
  Description of Artificial Sequence: Synthetic oligonucleotide
acagtgcagatgccaccta

SEQ ID NO: 662 - DNA, 19 bp, Artificial Sequence
  Description of Artificial Sequence: Synthetic oligonucleotide
cagtgcagatgccacctac

SEQ ID NO: 663 - DNA, 19 bp, Artificial Sequence
  Description of Artificial Sequence: Synthetic oligonucleotide
agtgcagatgccacctaca

SEQ ID NO: 664 - DNA, 19 bp, Artificial Sequence
  Description of Artificial Sequence: Synthetic oligonucleotide
gtgcagatgccacctacaa

SEQ ID NO: 665 - DNA, 19 bp, Artificial Sequence
  Description of Artificial Sequence: Synthetic oligonucleotide
tgcagatgccacctacaat

SEQ ID NO: 666 - DNA, 19 bp, Artificial Sequence
  Description of Artificial Sequence: Synthetic oligonucleotide
gcagatgccacctacaatc

SEQ ID NO: 667 - DNA, 19 bp, Artificial Sequence
  Description of Artificial Sequence: Synthetic oligonucleotide
cagatgccacctacaatcg

SEQ ID NO: 668 - DNA, 19 bp, Artificial Sequence
  Description of Artificial Sequence: Synthetic oligonucleotide
agatgccacctacaatcga

SEQ ID NO: 669 - DNA, 19 bp, Artificial Sequence
  Description of Artificial Sequence: Synthetic oligonucleotide
gatgccacctacaatcgag

SEQ ID NO: 670 - DNA, 19 bp, Artificial Sequence
  Description of Artificial Sequence: Synthetic oligonucleotide
atgccacctacaatcgagg

SEQ ID NO: 671 - DNA, 19 bp, Artificial Sequence
  Description of Artificial Sequence: Synthetic oligonucleotide
tgccacctacaatcgaggg

SEQ ID NO: 672 - DNA, 19 bp, Artificial Sequence
  Description of Artificial Sequence: Synthetic oligonucleotide
gccacctacaatcgagggc

SEQ ID NO: 673 - DNA, 19 bp, Artificial Sequence
  Description of Artificial Sequence: Synthetic oligonucleotide
ccacctacaatcgagggcc

SEQ ID NO: 674 - DNA, 19 bp, Artificial Sequence
  Description of Artificial Sequence: Synthetic oligonucleotide
cacctacaatcgagggcca

SEQ ID NO: 675 - DNA, 19 bp, Artificial Sequence
  Description of Artificial Sequence: Synthetic oligonucleotide
acctacaatcgagggccac

SEQ ID NO: 676 - DNA, 19 bp, Artificial Sequence
  Description of Artificial Sequence: Synthetic oligonucleotide
cctacaatcgagggccact

SEQ ID NO: 677 - DNA, 19 bp, Artificial Sequence
  Description of Artificial Sequence: Synthetic oligonucleotide
ctacaatcgagggccactg

SEQ ID NO: 678 - DNA, 19 bp, Artificial Sequence
  Description of Artificial Sequence: Synthetic oligonucleotide
tacaatcgagggccactgg

SEQ ID NO: 679 - DNA, 19 bp, Artificial Sequence
  Description of Artificial Sequence: Synthetic oligonucleotide
acaatcgagggccactggg

SEQ ID NO: 680 - DNA, 19 bp, Artificial Sequence
  Description of Artificial Sequence: Synthetic oligonucleotide
caatcgagggccactgggt

SEQ ID NO: 681 - DNA, 19 bp, Artificial Sequence
  Description of Artificial Sequence: Synthetic oligonucleotide
aatcgagggccactgggtc

SEQ ID NO: 682 - DNA, 19 bp, Artificial Sequence
  Description of Artificial Sequence: Synthetic oligonucleotide
atcgagggccactgggtct

SEQ ID NO: 683 - DNA, 19 bp, Artificial Sequence
  Description of Artificial Sequence: Synthetic oligonucleotide
tcgagggccactgggtctc

SEQ ID NO: 684 - DNA, 19 bp, Artificial Sequence
  Description of Artificial Sequence: Synthetic oligonucleotide
cgagggccactgggtctcc

SEQ ID NO: 685 - DNA, 19 bp, Artificial Sequence
  Description of Artificial Sequence: Synthetic oligonucleotide
gagggccactgggtctcca

SEQ ID NO: 686 - DNA, 19 bp, Artificial Sequence
  Description of Artificial Sequence: Synthetic oligonucleotide
agggccactgggtctccac

SEQ ID NO: 687 - DNA, 19 bp, Artificial Sequence
  Description of Artificial Sequence: Synthetic oligonucleotide
gggccactgggtctccaca

SEQ ID NO: 688 - DNA, 19 bp, Artificial Sequence
  Description of Artificial Sequence: Synthetic oligonucleotide
ggccactgggtctccacag

SEQ ID NO: 689 - DNA, 19 bp, Artificial Sequence
  Description of Artificial Sequence: Synthetic oligonucleotide
gccactgggtctccacagg

SEQ ID NO: 690 - DNA, 19 bp, Artificial Sequence
  Description of Artificial Sequence: Synthetic oligonucleotide
ccactgggtctccacaggc

SEQ ID NO: 691 - DNA, 19 bp, Artificial Sequence
  Description of Artificial Sequence: Synthetic oligonucleotide
cactgggtctccacaggct

SEQ ID NO: 692 - DNA, 19 bp, Artificial Sequence
  Description of Artificial Sequence: Synthetic oligonucleotide
actgggtctccacaggctg

SEQ ID NO: 693 - DNA, 19 bp, Artificial Sequence
  Description of Artificial Sequence: Synthetic oligonucleotide
ctgggtctccacaggctgt

SEQ ID NO: 694 - DNA, 19 bp, Artificial Sequence
  Description of Artificial Sequence: Synthetic oligonucleotide
tgggtctccacaggctgtg

SEQ ID NO: 695 - DNA, 19 bp, Artificial Sequence
  Description of Artificial Sequence: Synthetic oligonucleotide
gggtctccacaggctgtga

SEQ ID NO: 696 - DNA, 19 bp, Artificial Sequence
  Description of Artificial Sequence: Synthetic oligonucleotide
ggtctccacaggctgtgaa

SEQ ID NO: 697 - DNA, 19 bp, Artificial Sequence
  Description of Artificial Sequence: Synthetic oligonucleotide
gtctccacaggctgtgaag

SEQ ID NO: 698 - DNA, 19 bp, Artificial Sequence
  Description of Artificial Sequence: Synthetic oligonucleotide
tctccacaggctgtgaagt

SEQ ID NO: 699 - DNA, 19 bp, Artificial Sequence
  Description of Artificial Sequence: Synthetic oligonucleotide
ctccacaggctgtgaagta

SEQ ID NO: 700 - DNA, 19 bp, Artificial Sequence
  Description of Artificial Sequence: Synthetic oligonucleotide
tccacaggctgtgaagtaa

SEQ ID NO: 701 - DNA, 19 bp, Artificial Sequence
  Description of Artificial Sequence: Synthetic oligonucleotide
ccacaggctgtgaagtaag

SEQ ID NO: 702 - DNA, 19 bp, Artificial Sequence
  Description of Artificial Sequence: Synthetic oligonucleotide
cacaggctgtgaagtaagg

SEQ ID NO: 703 - DNA, 19 bp, Artificial Sequence
  Description of Artificial Sequence: Synthetic oligonucleotide
acaggctgtgaagtaaggt

SEQ ID NO: 704 - DNA, 19 bp, Artificial Sequence
  Description of Artificial Sequence: Synthetic oligonucleotide
caggctgtgaagtaaggtc

SEQ ID NO: 705 - DNA, 19 bp, Artificial Sequence
  Description of Artificial Sequence: Synthetic oligonucleotide
aggctgtgaagtaaggtca

SEQ ID NO: 706 - DNA, 19 bp, Artificial Sequence
  Description of Artificial Sequence: Synthetic oligonucleotide
ggctgtgaagtaaggtcag

SEQ ID NO: 707 - DNA, 19 bp, Artificial Sequence
  Description of Artificial Sequence: Synthetic oligonucleotide
gctgtgaagtaaggtcagg

SEQ ID NO: 708 - DNA, 19 bp, Artificial Sequence
  Description of Artificial Sequence: Synthetic oligonucleotide
ctgtgaagtaaggtcaggc

SEQ ID NO: 709 - DNA, 19 bp, Artificial Sequence
  Description of Artificial Sequence: Synthetic oligonucleotide
tgtgaagtaaggtcaggcc

SEQ ID NO: 710 - DNA, 19 bp, Artificial Sequence
  Description of Artificial Sequence: Synthetic oligonucleotide
gtgaagtaaggtcaggccc

SEQ ID NO: 711 - DNA, 19 bp, Artificial Sequence
  Description of Artificial Sequence: Synthetic oligonucleotide
tgaagtaaggtcaggccca

SEQ ID NO: 712 - DNA, 19 bp, Artificial Sequence
  Description of Artificial Sequence: Synthetic oligonucleotide
gaagtaaggtcaggcccag

SEQ ID NO: 713 - DNA, 19 bp, Artificial Sequence
  Description of Artificial Sequence: Synthetic oligonucleotide
aagtaaggtcaggcccaga

SEQ ID NO: 714 - DNA, 19 bp, Artificial Sequence
  Description of Artificial Sequence: Synthetic oligonucleotide
agtaaggtcaggcccagag

SEQ ID NO: 715 - DNA, 19 bp, Artificial Sequence
  Description of Artificial Sequence: Synthetic oligonucleotide
gtaaggtcaggcccagagt

SEQ ID NO: 716 - DNA, 19 bp, Artificial Sequence
  Description of Artificial Sequence: Synthetic oligonucleotide
taaggtcaggcccagagtt

SEQ ID NO: 717 - DNA, 19 bp, Artificial Sequence
  Description of Artificial Sequence: Synthetic oligonucleotide
aaggtcaggcccagagttc

SEQ ID NO: 718 - DNA, 19 bp, Artificial Sequence
  Description of Artificial Sequence: Synthetic oligonucleotide
aggtcaggcccagagttca

SEQ ID NO: 719 - DNA, 19 bp, Artificial Sequence
  Description of Artificial Sequence: Synthetic oligonucleotide
ggtcaggcccagagttcat

SEQ ID NO: 720 - DNA, 19 bp, Artificial Sequence
  Description of Artificial Sequence: Synthetic oligonucleotide
gtcaggcccagagttcatc

SEQ ID NO: 721 - DNA, 19 bp, Artificial Sequence
  Description of Artificial Sequence: Synthetic oligonucleotide
tcaggcccagagttcatca

SEQ ID NO: 722 - DNA, 19 bp, Artificial Sequence
  Description of Artificial Sequence: Synthetic oligonucleotide
caggcccagagttcatcac

SEQ ID NO: 723 - DNA, 19 bp, Artificial Sequence
  Description of Artificial Sequence: Synthetic oligonucleotide
aggcccagagttcatcaca

SEQ ID NO: 724 - DNA, 19 bp, Artificial Sequence
  Description of Artificial Sequence: Synthetic oligonucleotide
ggcccagagttcatcacaa

SEQ ID NO: 725 - DNA, 19 bp, Artificial Sequence
  Description of Artificial Sequence: Synthetic oligonucleotide
gcccagagttcatcacaag

SEQ ID NO: 726 - DNA, 19 bp, Artificial Sequence
  Description of Artificial Sequence: Synthetic oligonucleotide
cccagagttcatcacaagg

SEQ ID NO: 727 - DNA, 19 bp, Artificial Sequence
  Description of Artificial Sequence: Synthetic oligonucleotide
ccagagttcatcacaaggt

SEQ ID NO: 728 - DNA, 19 bp, Artificial Sequence
  Description of Artificial Sequence: Synthetic oligonucleotide
cagagttcatcacaaggtc

SEQ ID NO: 729 - DNA, 19 bp, Artificial Sequence
  Description of Artificial Sequence: Synthetic oligonucleotide
agagttcatcacaaggtcc

SEQ ID NO: 730 - DNA, 19 bp, Artificial Sequence
  Description of Artificial Sequence: Synthetic oligonucleotide
gagttcatcacaaggtcct

SEQ ID NO: 731 - DNA, 19 bp, Artificial Sequence
  Description of Artificial Sequence: Synthetic oligonucleotide
agttcatcacaaggtccta

SEQ ID NO: 732 - DNA, 19 bp, Artificial Sequence
  Description of Artificial Sequence: Synthetic oligonucleotide
gttcatcacaaggtcctac

SEQ ID NO: 733 - DNA, 19 bp, Artificial Sequence
  Description of Artificial Sequence: Synthetic oligonucleotide
ttcatcacaaggtcctaca

SEQ ID NO: 734 - DNA, 19 bp, Artificial Sequence
  Description of Artificial Sequence: Synthetic oligonucleotide
tcatcacaaggtcctacag

SEQ ID NO: 735 - DNA, 19 bp, Artificial Sequence
  Description of Artificial Sequence: Synthetic oligonucleotide
catcacaaggtcctacaga

SEQ ID NO: 736 - DNA, 19 bp, Artificial Sequence
  Description of Artificial Sequence: Synthetic oligonucleotide
atcacaaggtcctacagat

SEQ ID NO: 737 - DNA, 19 bp, Artificial Sequence
  Description of Artificial Sequence: Synthetic oligonucleotide
tcacaaggtcctacagatt

SEQ ID NO: 738 - DNA, 19 bp, Artificial Sequence
  Description of Artificial Sequence: Synthetic oligonucleotide
cacaaggtcctacagattc

SEQ ID NO: 739 - DNA, 19 bp, Artificial Sequence
  Description of Artificial Sequence: Synthetic oligonucleotide
acaaggtcctacagattct

SEQ ID NO: 740 - DNA, 19 bp, Artificial Sequence
  Description of Artificial Sequence: Synthetic oligonucleotide
caaggtcctacagattcta

SEQ ID NO: 741 - DNA, 19 bp, Artificial Sequence
  Description of Artificial Sequence: Synthetic oligonucleotide
aaggtcctacagattctac

SEQ ID NO: 742 - DNA, 19 bp, Artificial Sequence
  Description of Artificial Sequence: Synthetic oligonucleotide
aggtcctacagattctacc

SEQ ID NO: 743 - DNA, 19 bp, Artificial Sequence
  Description of Artificial Sequence: Synthetic oligonucleotide
ggtcctacagattctacca

SEQ ID NO: 744 - DNA, 19 bp, Artificial Sequence
  Description of Artificial Sequence: Synthetic oligonucleotide
gtcctacagattctaccac

SEQ ID NO: 745 - DNA, 19 bp, Artificial Sequence
  Description of Artificial Sequence: Synthetic oligonucleotide
tcctacagattctaccaca

SEQ ID NO: 746 - DNA, 19 bp, Artificial Sequence
  Description of Artificial Sequence: Synthetic oligonucleotide
cctacagattctaccacaa

SEQ ID NO: 747 - DNA, 19 bp, Artificial Sequence
  Description of Artificial Sequence: Synthetic oligonucleotide
ctacagattctaccacaat

SEQ ID NO: 748 - DNA, 19 bp, Artificial Sequence
  Description of Artificial Sequence: Synthetic oligonucleotide
tacagattctaccacaata

SEQ ID NO: 749 - DNA, 19 bp, Artificial Sequence
  Description of Artificial Sequence: Synthetic oligonucleotide
acagattctaccacaataa

SEQ ID NO: 750 - DNA, 19 bp, Artificial Sequence
  Description of Artificial Sequence: Synthetic oligonucleotide
cagattctaccacaataac

SEQ ID NO: 751 - DNA, 19 bp, Artificial Sequence
  Description of Artificial Sequence: Synthetic oligonucleotide
agattctaccacaataaca

SEQ ID NO: 752 - DNA, 19 bp, Artificial Sequence
  Description of Artificial Sequence: Synthetic oligonucleotide
gattctaccacaataacac

SEQ ID NO: 753 - DNA, 19 bp, Artificial Sequence
  Description of Artificial Sequence: Synthetic oligonucleotide
attctaccacaataacacc

SEQ ID NO: 754 - DNA, 19 bp, Artificial Sequence
  Description of Artificial Sequence: Synthetic oligonucleotide
ttctaccacaataacacct

SEQ ID NO: 755 - DNA, 19 bp, Artificial Sequence
  Description of Artificial Sequence: Synthetic oligonucleotide
tctaccacaataacacctt

SEQ ID NO: 756 - DNA, 19 bp, Artificial Sequence
  Description of Artificial Sequence: Synthetic oligonucleotide
ctaccacaataacaccttc

SEQ ID NO: 757 - DNA, 19 bp, Artificial Sequence
  Description of Artificial Sequence: Synthetic oligonucleotide
taccacaataacaccttca

SEQ ID NO: 758 - DNA, 19 bp, Artificial Sequence
  Description of Artificial Sequence: Synthetic oligonucleotide
accacaataacaccttcaa

SEQ ID NO: 759 - DNA, 19 bp, Artificial Sequence
  Description of Artificial Sequence: Synthetic oligonucleotide
ccacaataacaccttcaag

SEQ ID NO: 760 - DNA, 19 bp, Artificial Sequence
  Description of Artificial Sequence: Synthetic oligonucleotide
cacaataacaccttcaagg

SEQ ID NO: 761 - DNA, 19 bp, Artificial Sequence
  Description of Artificial Sequence: Synthetic oligonucleotide
acaataacaccttcaaggc

SEQ ID NO: 762 - DNA, 19 bp, Artificial Sequence
  Description of Artificial Sequence: Synthetic oligonucleotide
caataacaccttcaaggcc

SEQ ID NO: 763 - DNA, 19 bp, Artificial Sequence
  Description of Artificial Sequence: Synthetic oligonucleotide
aataacaccttcaaggcct

SEQ ID NO: 764 - DNA, 19 bp, Artificial Sequence
  Description of Artificial Sequence: Synthetic oligonucleotide
ataacaccttcaaggccta

SEQ ID NO: 765 - DNA, 19 bp, Artificial Sequence
  Description of Artificial Sequence: Synthetic oligonucleotide
taacaccttcaaggcctac

SEQ ID NO: 766 - DNA, 19 bp, Artificial Sequence
  Description of Artificial Sequence: Synthetic oligonucleotide
aacaccttcaaggcctacc

SEQ ID NO: 767 - DNA, 19 bp, Artificial Sequence
  Description of Artificial Sequence: Synthetic oligonucleotide
acaccttcaaggcctacca

SEQ ID NO: 768 - DNA, 19 bp, Artificial Sequence
  Description of Artificial Sequence: Synthetic oligonucleotide
caccttcaaggcctaccaa

SEQ ID NO: 769 - DNA, 19 bp, Artificial Sequence
  Description of Artificial Sequence: Synthetic oligonucleotide
accttcaaggcctaccaat

SEQ ID NO: 770 - DNA, 19 bp, Artificial Sequence
  Description of Artificial Sequence: Synthetic oligonucleotide
ccttcaaggcctaccaatt

SEQ ID NO: 771 - DNA, 19 bp, Artificial Sequence
  Description of Artificial Sequence: Synthetic oligonucleotide
cttcaaggcctaccaattt

SEQ ID NO: 772 - DNA, 19 bp, Artificial Sequence
  Description of Artificial Sequence: Synthetic oligonucleotide
ttcaaggcctaccaatttt

SEQ ID NO: 773 - DNA, 19 bp, Artificial Sequence
  Description of Artificial Sequence: Synthetic oligonucleotide
tcaaggcctaccaatttta

SEQ ID NO: 774 - DNA, 19 bp, Artificial Sequence
  Description of Artificial Sequence: Synthetic oligonucleotide
caaggcctaccaattttat

SEQ ID NO: 775 - DNA, 19 bp, Artificial Sequence
  Description of Artificial Sequence: Synthetic oligonucleotide
aaggcctaccaattttatt

SEQ ID NO: 776 - DNA, 19 bp, Artificial Sequence
  Description of Artificial Sequence: Synthetic oligonucleotide
aggcctaccaattttatta

SEQ ID NO: 777 - DNA, 19 bp, Artificial Sequence
  Description of Artificial Sequence: Synthetic oligonucleotide
ggcctaccaattttattat

SEQ ID NO: 778 - DNA, 19 bp, Artificial Sequence
  Description of Artificial Sequence: Synthetic oligonucleotide
gcctaccaattttattatg

SEQ ID NO: 779 - DNA, 19 bp, Artificial Sequence
  Description of Artificial Sequence: Synthetic oligonucleotide
cctaccaattttattatgg

SEQ ID NO: 780 - DNA, 19 bp, Artificial Sequence
  Description of Artificial Sequence: Synthetic oligonucleotide
ctaccaattttattatggc

SEQ ID NO: 781 - DNA, 19 bp, Artificial Sequence
  Description of Artificial Sequence: Synthetic oligonucleotide
taccaattttattatggca

SEQ ID NO: 782 - DNA, 19 bp, Artificial Sequence
  Description of Artificial Sequence: Synthetic oligonucleotide
accaattttattatggcag

SEQ ID NO: 783 - DNA, 19 bp, Artificial Sequence
  Description of Artificial Sequence: Synthetic oligonucleotide
ccaattttattatggcagc

SEQ ID NO: 784 - DNA, 19 bp, Artificial Sequence
  Description of Artificial Sequence: Synthetic oligonucleotide
caattttattatggcagca

SEQ ID NO: 785 - DNA, 19 bp, Artificial Sequence
  Description of Artificial Sequence: Synthetic oligonucleotide
aattttattatggcagcaa

SEQ ID NO: 786 - DNA, 19 bp, Artificial Sequence
  Description of Artificial Sequence: Synthetic oligonucleotide
attttattatggcagcaac

SEQ ID NO: 787 - DNA, 19 bp, Artificial Sequence
  Description of Artificial Sequence: Synthetic oligonucleotide
ttttattatggcagcaacc

SEQ ID NO: 788 - DNA, 19 bp, Artificial Sequence
  Description of Artificial Sequence: Synthetic oligonucleotide
tttattatggcagcaaccg

SEQ ID NO: 789 - DNA, 19 bp, Artificial Sequence
  Description of Artificial Sequence: Synthetic oligonucleotide
ttattatggcagcaaccgg

SEQ ID NO: 790 - DNA, 19 bp, Artificial Sequence
  Description of Artificial Sequence: Synthetic oligonucleotide
tattatggcagcaaccggt

SEQ ID NO: 791 - DNA, 19 bp, Artificial Sequence
  Description of Artificial Sequence: Synthetic oligonucleotide
attatggcagcaaccggtg

SEQ ID NO: 792 - DNA, 19 bp, Artificial Sequence
  Description of Artificial Sequence: Synthetic oligonucleotide
ttatggcagcaaccggtgc

SEQ ID NO: 793 - DNA, 19 bp, Artificial Sequence
  Description of Artificial Sequence: Synthetic oligonucleotide
tatggcagcaaccggtgca

SEQ ID NO: 794 - DNA, 19 bp, Artificial Sequence
  Description of Artificial Sequence: Synthetic oligonucleotide
atggcagcaaccggtgcac

SEQ ID NO: 795 - DNA, 19 bp, Artificial Sequence
  Description of Artificial Sequence: Synthetic oligonucleotide
tggcagcaaccggtgcaca

SEQ ID NO: 796 - DNA, 19 bp, Artificial Sequence
  Description of Artificial Sequence: Synthetic oligonucleotide
ggcagcaaccggtgcacaa

SEQ ID NO: 797 - DNA, 19 bp, Artificial Sequence
  Description of Artificial Sequence: Synthetic oligonucleotide
gcagcaaccggtgcacaaa

SEQ ID NO: 798 - DNA, 19 bp, Artificial Sequence
  Description of Artificial Sequence: Synthetic oligonucleotide
cagcaaccggtgcacaaat

SEQ ID NO: 799 - DNA, 19 bp, Artificial Sequence
  Description of Artificial Sequence: Synthetic oligonucleotide
agcaaccggtgcacaaatc

SEQ ID NO: 800 - DNA, 19 bp, Artificial Sequence
  Description of Artificial Sequence: Synthetic oligonucleotide
gcaaccggtgcacaaatcc

SEQ ID NO: 801 - DNA, 19 bp, Artificial Sequence
  Description of Artificial Sequence: Synthetic oligonucleotide
caaccggtgcacaaatccc

SEQ ID NO: 802 - DNA, 19 bp, Artificial Sequence
  Description of Artificial Sequence: Synthetic oligonucleotide
aaccggtgcacaaatccca

SEQ ID NO: 803 - DNA, 19 bp, Artificial Sequence
  Description of Artificial Sequence: Synthetic oligonucleotide
accggtgcacaaatcccac

SEQ ID NO: 804 - DNA, 19 bp, Artificial Sequence
  Description of Artificial Sequence: Synthetic oligonucleotide
ccggtgcacaaatcccact

SEQ ID NO: 805 - DNA, 19 bp, Artificial Sequence
  Description of Artificial Sequence: Synthetic oligonucleotide
cggtgcacaaatcccactt

SEQ ID NO: 806 - DNA, 19 bp, Artificial Sequence
  Description of Artificial Sequence: Synthetic oligonucleotide
ggtgcacaaatcccactta

SEQ ID NO: 807 - DNA, 19 bp, Artificial Sequence
  Description of Artificial Sequence: Synthetic oligonucleotide
gtgcacaaatcccacttat

SEQ ID NO: 808 - DNA, 19 bp, Artificial Sequence
  Description of Artificial Sequence: Synthetic oligonucleotide
tgcacaaatcccacttata

SEQ ID NO: 809 - DNA, 19 bp, Artificial Sequence
  Description of Artificial Sequence: Synthetic oligonucleotide
gcacaaatcccacttatac

SEQ ID NO: 810 - DNA, 19 bp, Artificial Sequence
  Description of Artificial Sequence: Synthetic oligonucleotide
cacaaatcccacttatact

SEQ ID NO: 811 - DNA, 19 bp, Artificial Sequence
  Description of Artificial Sequence: Synthetic oligonucleotide
acaaatcccacttatactc

SEQ ID NO: 812 - DNA, 19 bp, Artificial Sequence
  Description of Artificial Sequence: Synthetic oligonucleotide
caaatcccacttatactct

SEQ ID NO: 813 - DNA, 19 bp, Artificial Sequence
  Description of Artificial Sequence: Synthetic oligonucleotide
aaatcccacttatactctc

SEQ ID NO: 814 - DNA, 19 bp, Artificial Sequence
  Description of Artificial Sequence: Synthetic oligonucleotide
aatcccacttatactctca

SEQ ID NO: 815 - DNA, 19 bp, Artificial Sequence
  Description of Artificial Sequence: Synthetic oligonucleotide
atcccacttatactctcat

SEQ ID NO: 816 - DNA, 19 bp, Artificial Sequence
  Description of Artificial Sequence: Synthetic oligonucleotide
tcccacttatactctcatc

SEQ ID NO: 817 - DNA, 19 bp, Artificial Sequence
  Description of Artificial Sequence: Synthetic oligonucleotide
cccacttatactctcatca

SEQ ID NO: 818 - DNA, 19 bp, Artificial Sequence
  Description of Artificial Sequence: Synthetic oligonucleotide
ccacttatactctcatcat

SEQ ID NO: 819 - DNA, 19 bp, Artificial Sequence
  Description of Artificial Sequence: Synthetic oligonucleotide
cacttatactctcatcatc

SEQ ID NO: 820 - DNA, 19 bp, Artificial Sequence
  Description of Artificial Sequence: Synthetic oligonucleotide
acttatactctcatcatcc

SEQ ID NO: 821 - DNA, 19 bp, Artificial Sequence
  Description of Artificial Sequence: Synthetic oligonucleotide
cttatactctcatcatccg

SEQ ID NO: 822 - DNA, 19 bp, Artificial Sequence
  Description of Artificial Sequence: Synthetic oligonucleotide
ttatactctcatcatccgg

SEQ ID NO: 823 - DNA, 19 bp, Artificial Sequence
  Description of Artificial Sequence: Synthetic oligonucleotide
tatactctcatcatccggg

SEQ ID NO: 824 - DNA, 19 bp, Artificial Sequence
  Description of Artificial Sequence: Synthetic oligonucleotide
atactctcatcatccgggg

SEQ ID NO: 825 - DNA, 19 bp, Artificial Sequence
  Description of Artificial Sequence: Synthetic oligonucleotide
tactctcatcatccggggc

SEQ ID NO: 826 - DNA, 19 bp, Artificial Sequence
  Description of Artificial Sequence: Synthetic oligonucleotide
actctcatcatccggggca

SEQ ID NO: 827 - DNA, 19 bp, Artificial Sequence
  Description of Artificial Sequence: Synthetic oligonucleotide
ctctcatcatccggggcaa

SEQ ID NO: 828 - DNA, 19 bp, Artificial Sequence
  Description of Artificial Sequence: Synthetic oligonucleotide
tctcatcatccggggcaag

SEQ ID NO: 829 - DNA, 19 bp, Artificial Sequence
  Description of Artificial Sequence: Synthetic oligonucleotide
ctcatcatccggggcaaga

SEQ ID NO: 830 - DNA, 19 bp, Artificial Sequence
  Description of Artificial Sequence: Synthetic oligonucleotide
tcatcatccggggcaagat

SEQ ID NO: 831 - DNA, 19 bp, Artificial Sequence
  Description of Artificial Sequence: Synthetic oligonucleotide
catcatccggggcaagatc

SEQ ID NO: 832 - DNA, 19 bp, Artificial Sequence
  Description of Artificial Sequence: Synthetic oligonucleotide
atcatccggggcaagatcc

SEQ ID NO: 833 - DNA, 19 bp, Artificial Sequence
  Description of Artificial Sequence: Synthetic oligonucleotide
tcatccggggcaagatccg

SEQ ID NO: 834 - DNA, 19 bp, Artificial Sequence
  Description of Artificial Sequence: Synthetic oligonucleotide
catccggggcaagatccgc

SEQ ID NO: 835 - DNA, 19 bp, Artificial Sequence
  Description of Artificial Sequence: Synthetic oligonucleotide
atccggggcaagatccgcc

SEQ ID NO: 836 - DNA, 19 bp, Artificial Sequence
  Description of Artificial Sequence: Synthetic oligonucleotide
tccggggcaagatccgcct

SEQ ID NO: 837 - DNA, 19 bp, Artificial Sequence
  Description of Artificial Sequence: Synthetic oligonucleotide
ccggggcaagatccgcctc

SEQ ID NO: 838 - DNA, 19 bp, Artificial Sequence
  Description of Artificial Sequence: Synthetic oligonucleotide
cggggcaagatccgcctcc

SEQ ID NO: 839 - DNA, 19 bp, Artificial Sequence
  Description of Artificial Sequence: Synthetic oligonucleotide
ggggcaagatccgcctccg

SEQ ID NO: 840 - DNA, 19 bp, Artificial Sequence
  Description of Artificial Sequence: Synthetic oligonucleotide
gggcaagatccgcctccgc

SEQ ID NO: 841 - DNA, 19 bp, Artificial Sequence
  Description of Artificial Sequence: Synthetic oligonucleotide
ggcaagatccgcctccgcc

SEQ ID NO: 842 - DNA, 19 bp, Artificial Sequence
  Description of Artificial Sequence: Synthetic oligonucleotide
gcaagatccgcctccgcca

SEQ ID NO: 843 - DNA, 19 bp, Artificial Sequence
  Description of Artificial Sequence: Synthetic oligonucleotide
caagatccgcctccgccag

SEQ ID NO: 844 - DNA, 19 bp, Artificial Sequence
  Description of Artificial Sequence: Synthetic oligonucleotide
aagatccgcctccgccagg

SEQ ID NO: 845 - DNA, 19 bp, Artificial Sequence
  Description of Artificial Sequence: Synthetic oligonucleotide
agatccgcctccgccaggc

SEQ ID NO: 846 - DNA, 19 bp, Artificial Sequence
  Description of Artificial Sequence: Synthetic oligonucleotide
gatccgcctccgccaggcc

SEQ ID NO: 847 - DNA, 19 bp, Artificial Sequence
  Description of Artificial Sequence: Synthetic oligonucleotide
atccgcctccgccaggcct

SEQ ID NO: 848 - DNA, 19 bp, Artificial Sequence
  Description of Artificial Sequence: Synthetic oligonucleotide
tccgcctccgccaggcctc

SEQ ID NO: 849 - DNA, 19 bp, Artificial Sequence
  Description of Artificial Sequence: Synthetic oligonucleotide
ccgcctccgccaggcctcc

SEQ ID NO: 850 - DNA, 19 bp, Artificial Sequence
  Description of Artificial Sequence: Synthetic oligonucleotide
cgcctccgccaggcctcct

SEQ ID NO: 851 - DNA, 19 bp, Artificial Sequence
  Description of Artificial Sequence: Synthetic oligonucleotide
gcctccgccaggcctcctg

SEQ ID NO: 852 - DNA, 19 bp, Artificial Sequence
  Description of Artificial Sequence: Synthetic oligonucleotide
cctccgccaggcctcctgg

SEQ ID NO: 853 - DNA, 19 bp, Artificial Sequence
  Description of Artificial Sequence: Synthetic oligonucleotide
ctccgccaggcctcctgga

SEQ ID NO: 854 - DNA, 19 bp, Artificial Sequence
  Description of Artificial Sequence: Synthetic oligonucleotide
tccgccaggcctcctggat

SEQ ID NO: 855 - DNA, 19 bp, Artificial Sequence
  Description of Artificial Sequence: Synthetic oligonucleotide
ccgccaggcctcctggatc

SEQ ID NO: 856 - DNA, 19 bp, Artificial Sequence
  Description of Artificial Sequence: Synthetic oligonucleotide
cgccaggcctcctggatca

SEQ ID NO: 857 - DNA, 19 bp, Artificial Sequence
  Description of Artificial Sequence: Synthetic oligonucleotide
gccaggcctcctggatcat

SEQ ID NO: 858 - DNA, 19 bp, Artificial Sequence
  Description of Artificial Sequence: Synthetic oligonucleotide
ccaggcctcctggatcatc

SEQ ID NO: 859 - DNA, 19 bp, Artificial Sequence
  Description of Artificial Sequence: Synthetic oligonucleotide
caggcctcctggatcatcc

SEQ ID NO: 860 - DNA, 19 bp, Artificial Sequence
  Description of Artificial Sequence: Synthetic oligonucleotide
aggcctcctggatcatccg

SEQ ID NO: 861 - DNA, 19 bp, Artificial Sequence
  Description of Artificial Sequence: Synthetic oligonucleotide
ggcctcctggatcatccga

SEQ ID NO: 862 - DNA, 19 bp, Artificial Sequence
  Description of Artificial Sequence: Synthetic oligonucleotide
gcctcctggatcatccgag

SEQ ID NO: 863 - DNA, 19 bp, Artificial Sequence
  Description of Artificial Sequence: Synthetic oligonucleotide
cctcctggatcatccgagg

SEQ ID NO: 864 - DNA, 19 bp, Artificial Sequence
  Description of Artificial Sequence: Synthetic oligonucleotide
ctcctggatcatccgaggg

SEQ ID NO: 865 - DNA, 19 bp, Artificial Sequence
  Description of Artificial Sequence: Synthetic oligonucleotide
tcctggatcatccgagggg

SEQ ID NO: 866 - DNA, 19 bp, Artificial Sequence
  Description of Artificial Sequence: Synthetic oligonucleotide
cctggatcatccgaggggg

SEQ ID NO: 867 - DNA, 19 bp, Artificial Sequence
  Description of Artificial Sequence: Synthetic oligonucleotide
ctggatcatccgagggggc

SEQ ID NO: 868 - DNA, 19 bp, Artificial Sequence
  Description of Artificial Sequence: Synthetic oligonucleotide
tggatcatccgagggggca

SEQ ID NO: 869 - DNA, 19 bp, Artificial Sequence
  Description of Artificial Sequence: Synthetic oligonucleotide
ggatcatccgagggggcac

SEQ ID NO: 870 - DNA, 19 bp, Artificial Sequence
  Description of Artificial Sequence: Synthetic oligonucleotide
gatcatccgagggggcacg

SEQ ID NO: 871 - DNA, 19 bp, Artificial Sequence
  Description of Artificial Sequence: Synthetic oligonucleotide
atcatccgagggggcacgg

SEQ ID NO: 872 - DNA, 19 bp, Artificial Sequence
  Description of Artificial Sequence: Synthetic oligonucleotide
tcatccgagggggcacgga

SEQ ID NO: 873 - DNA, 19 bp, Artificial Sequence
  Description of Artificial Sequence: Synthetic oligonucleotide
catccgagggggcacggaa

SEQ ID NO: 874 - DNA, 19 bp, Artificial Sequence
  Description of Artificial Sequence: Synthetic oligonucleotide
atccgagggggcacggaag

SEQ ID NO: 875 - DNA, 19 bp, Artificial Sequence
  Description of Artificial Sequence: Synthetic oligonucleotide
tccgagggggcacggaagc

SEQ ID NO: 876 - DNA, 19 bp, Artificial Sequence
  Description of Artificial Sequence: Synthetic oligonucleotide
ccgagggggcacggaagcc

SEQ ID NO: 877 - DNA, 19 bp, Artificial Sequence
  Description of Artificial Sequence: Synthetic oligonucleotide
cgagggggcacggaagccg

SEQ ID NO: 878 - DNA, 19 bp, Artificial Sequence
  Description of Artificial Sequence: Synthetic oligonucleotide
gagggggcacggaagccga

SEQ ID NO: 879 - DNA, 19 bp, Artificial Sequence
  Description of Artificial Sequence: Synthetic oligonucleotide
agggggcacggaagccgac

SEQ ID NO: 880 - DNA, 19 bp, Artificial Sequence
  Description of Artificial Sequence: Synthetic oligonucleotide
gggggcacggaagccgact

SEQ ID NO: 881 - DNA, 19 bp, Artificial Sequence
  Description of Artificial Sequence: Synthetic oligonucleotide
ggggcacggaagccgacta

SEQ ID NO: 882 - DNA, 19 bp, Artificial Sequence
  Description of Artificial Sequence: Synthetic oligonucleotide
gggcacggaagccgactac

SEQ ID NO: 883 - DNA, 19 bp, Artificial Sequence
  Description of Artificial Sequence: Synthetic oligonucleotide
ggcacggaagccgactacc

SEQ ID NO: 884 - DNA, 19 bp, Artificial Sequence
  Description of Artificial Sequence: Synthetic oligonucleotide
gcacggaagccgactacca

SEQ ID NO: 885 - DNA, 19 bp, Artificial Sequence
  Description of Artificial Sequence: Synthetic oligonucleotide
cacggaagccgactaccag

SEQ ID NO: 886 - DNA, 19 bp, Artificial Sequence
  Description of Artificial Sequence: Synthetic oligonucleotide
acggaagccgactaccagc

SEQ ID NO: 887 - DNA, 19 bp, Artificial Sequence
  Description of Artificial Sequence: Synthetic oligonucleotide
cggaagccgactaccagct

SEQ ID NO: 888 - DNA, 19 bp, Artificial Sequence
  Description of Artificial Sequence: Synthetic oligonucleotide
ggaagccgactaccagctg

SEQ ID NO: 889 - DNA, 19 bp, Artificial Sequence
  Description of Artificial Sequence: Synthetic oligonucleotide
gaagccgactaccagctgc

SEQ ID NO: 890 - DNA, 19 bp, Artificial Sequence
  Description of Artificial Sequence: Synthetic oligonucleotide
aagccgactaccagctgca

SEQ ID NO: 891 - DNA, 19 bp, Artificial Sequence
  Description of Artificial Sequence: Synthetic oligonucleotide
agccgactaccagctgcac

SEQ ID NO: 892 - DNA, 19 bp, Artificial Sequence
  Description of Artificial Sequence: Synthetic oligonucleotide
gccgactaccagctgcaca

SEQ ID NO: 893 - DNA, 19 bp, Artificial Sequence
  Description of Artificial Sequence: Synthetic oligonucleotide
ccgactaccagctgcacaa

SEQ ID NO: 894 - DNA, 19 bp, Artificial Sequence
  Description of Artificial Sequence: Synthetic oligonucleotide
cgactaccagctgcacaac

SEQ ID NO: 895 - DNA, 19 bp, Artificial Sequence
  Description of Artificial Sequence: Synthetic oligonucleotide
gactaccagctgcacaacg

SEQ ID NO: 896 - DNA, 19 bp, Artificial Sequence
  Description of Artificial Sequence: Synthetic oligonucleotide
actaccagctgcacaacgt

SEQ ID NO: 897 - DNA, 19 bp, Artificial Sequence
  Description of Artificial Sequence: Synthetic oligonucleotide
ctaccagctgcacaacgtc

SEQ ID NO: 898 - DNA, 19 bp, Artificial Sequence
  Description of Artificial Sequence: Synthetic oligonucleotide
taccagctgcacaacgtcc

SEQ ID NO: 899 - DNA, 19 bp, Artificial Sequence
  Description of Artificial Sequence: Synthetic oligonucleotide
accagctgcacaacgtcca

SEQ ID NO: 900 - DNA, 19 bp, Artificial Sequence
  Description of Artificial Sequence: Synthetic oligonucleotide
ccagctgcacaacgtccag

SEQ ID NO: 901 - DNA, 19 bp, Artificial Sequence
  Description of Artificial Sequence: Synthetic oligonucleotide
cagctgcacaacgtccagg

SEQ ID NO: 902 - DNA, 19 bp, Artificial Sequence
  Description of Artificial Sequence: Synthetic oligonucleotide
agctgcacaacgtccaggt

SEQ ID NO: 903 - DNA, 19 bp, Artificial Sequence
  Description of Artificial Sequence: Synthetic oligonucleotide
gctgcacaacgtccaggtg

SEQ ID NO: 904 - DNA, 19 bp, Artificial Sequence
  Description of Artificial Sequence: Synthetic oligonucleotide
ctgcacaacgtccaggtga

SEQ ID NO: 905 - DNA, 19 bp, Artificial Sequence
  Description of Artificial Sequence: Synthetic oligonucleotide
tgcacaacgtccaggtgat

SEQ ID NO: 906 - DNA, 19 bp, Artificial Sequence
  Description of Artificial Sequence: Synthetic oligonucleotide
gcacaacgtccaggtgatc

SEQ ID NO: 907 - DNA, 19 bp, Artificial Sequence
  Description of Artificial Sequence: Synthetic oligonucleotide
cacaacgtccaggtgatct

SEQ ID NO: 908 - DNA, 19 bp, Artificial Sequence
  Description of Artificial Sequence: Synthetic oligonucleotide
acaacgtccaggtgatctg

SEQ ID NO: 909 - DNA, 19 bp, Artificial Sequence
  Description of Artificial Sequence: Synthetic oligonucleotide
caacgtccaggtgatctgc

SEQ ID NO: 910 - DNA, 19 bp, Artificial Sequence
  Description of Artificial Sequence: Synthetic oligonucleotide
aacgtccaggtgatctgcc

SEQ ID NO: 911 - DNA, 19 bp, Artificial Sequence
  Description of Artificial Sequence: Synthetic oligonucleotide
acgtccaggtgatctgcca

SEQ ID NO: 912 - DNA, 19 bp, Artificial Sequence
  Description of Artificial Sequence: Synthetic oligonucleotide
cgtccaggtgatctgccac

SEQ ID NO: 913 - DNA, 19 bp, Artificial Sequence
  Description of Artificial Sequence: Synthetic oligonucleotide
gtccaggtgatctgccaca

SEQ ID NO: 914 - DNA, 19 bp, Artificial Sequence
  Description of Artificial Sequence: Synthetic oligonucleotide
tccaggtgatctgccacac

SEQ ID NO: 915 - DNA, 19 bp, Artificial Sequence
  Description of Artificial Sequence: Synthetic oligonucleotide
ccaggtgatctgccacaca

SEQ ID NO: 916 - DNA, 19 bp, Artificial Sequence
  Description of Artificial Sequence: Synthetic oligonucleotide
caggtgatctgccacacag

SEQ ID NO: 917 - DNA, 19 bp, Artificial Sequence
  Description of Artificial Sequence: Synthetic oligonucleotide
aggtgatctgccacacaga

SEQ ID NO: 918 - DNA, 19 bp, Artificial Sequence
  Description of Artificial Sequence: Synthetic oligonucleotide
ggtgatctgccacacagag

SEQ ID NO: 919 - DNA, 19 bp, Artificial Sequence
  Description of Artificial Sequence: Synthetic oligonucleotide
gtgatctgccacacagagg

SEQ ID NO: 920 - DNA, 19 bp, Artificial Sequence
  Description of Artificial Sequence: Synthetic oligonucleotide
tgatctgccacacagaggc

SEQ ID NO: 921 - DNA, 19 bp, Artificial Sequence
  Description of Artificial Sequence: Synthetic oligonucleotide
gatctgccacacagaggcg

SEQ ID NO: 922 - DNA, 19 bp, Artificial Sequence
  Description of Artificial Sequence: Synthetic oligonucleotide
atctgccacacagaggcgg

SEQ ID NO: 923 - DNA, 19 bp, Artificial Sequence
  Description of Artificial Sequence: Synthetic oligonucleotide
tctgccacacagaggcggt

SEQ ID NO: 924 - DNA, 19 bp, Artificial Sequence
  Description of Artificial Sequence: Synthetic oligonucleotide
ctgccacacagaggcggtg

SEQ ID NO: 925 - DNA, 19 bp, Artificial Sequence
  Description of Artificial Sequence: Synthetic oligonucleotide
tgccacacagaggcggtgg

SEQ ID NO: 926 - DNA, 19 bp, Artificial Sequence
  Description of Artificial Sequence: Synthetic oligonucleotide
gccacacagaggcggtggc

SEQ ID NO: 927 - DNA, 19 bp, Artificial Sequence
  Description of Artificial Sequence: Synthetic oligonucleotide
ccacacagaggcggtggcc

SEQ ID NO: 928 - DNA, 19 bp, Artificial Sequence
  Description of Artificial Sequence: Synthetic oligonucleotide
cacacagaggcggtggccg

SEQ ID NO: 929 - DNA, 19 bp, Artificial Sequence
  Description of Artificial Sequence: Synthetic oligonucleotide
acacagaggcggtggccga

SEQ ID NO: 930 - DNA, 19 bp, Artificial Sequence
  Description of Artificial Sequence: Synthetic oligonucleotide
cacagaggcggtggccgag

SEQ ID NO: 931 - DNA, 19 bp, Artificial Sequence
  Description of Artificial Sequence: Synthetic oligonucleotide
acagaggcggtggccgaga

SEQ ID NO: 932 - DNA, 19 bp, Artificial Sequence
  Description of Artificial Sequence: Synthetic oligonucleotide
cagaggcggtggccgagaa

SEQ ID NO: 933 - DNA, 19 bp, Artificial Sequence
  Description of Artificial Sequence: Synthetic oligonucleotide
agaggcggtggccgagaag

SEQ ID NO: 934 - DNA, 19 bp, Artificial Sequence
  Description of Artificial Sequence: Synthetic oligonucleotide
gaggcggtggccgagaagc

SEQ ID NO: 935 - DNA, 19 bp, Artificial Sequence
  Description of Artificial Sequence: Synthetic oligonucleotide
aggcggtggccgagaagct

SEQ ID NO: 936 - DNA, 19 bp, Artificial Sequence
  Description of Artificial Sequence: Synthetic oligonucleotide
ggcggtggccgagaagctc

SEQ ID NO: 937 - DNA, 19 bp, Artificial Sequence
  Description of Artificial Sequence: Synthetic oligonucleotide
gcggtggccgagaagctcg

SEQ ID NO: 938 - DNA, 19 bp, Artificial Sequence
  Description of Artificial Sequence: Synthetic oligonucleotide
cggtggccgagaagctcgg

SEQ ID NO: 939 - DNA, 19 bp, Artificial Sequence
  Description of Artificial Sequence: Synthetic oligonucleotide
ggtggccgagaagctcggc

SEQ ID NO: 940 - DNA, 19 bp, Artificial Sequence
  Description of Artificial Sequence: Synthetic oligonucleotide
gtggccgagaagctcggcc

SEQ ID NO: 941 - DNA, 19 bp, Artificial Sequence
  Description of Artificial Sequence: Synthetic oligonucleotide
tggccgagaagctcggcca

SEQ ID NO: 942 - DNA, 19 bp, Artificial Sequence
  Description of Artificial Sequence: Synthetic oligonucleotide
ggccgagaagctcggccag

SEQ ID NO: 943 - DNA, 19 bp, Artificial Sequence
  Description of Artificial Sequence: Synthetic oligonucleotide
gccgagaagctcggccagc

SEQ ID NO: 944 - DNA, 19 bp, Artificial Sequence
  Description of Artificial Sequence: Synthetic oligonucleotide
ccgagaagctcggccagca

SEQ ID NO: 945 - DNA, 19 bp, Artificial Sequence
  Description of Artificial Sequence: Synthetic oligonucleotide
cgagaagctcggccagcag

SEQ ID NO: 946 - DNA, 19 bp, Artificial Sequence
  Description of Artificial Sequence: Synthetic oligonucleotide
gagaagctcggccagcagg

SEQ ID NO: 947 - DNA, 19 bp, Artificial Sequence
  Description of Artificial Sequence: Synthetic oligonucleotide
agaagctcggccagcaggt

SEQ ID NO: 948 - DNA, 19 bp, Artificial Sequence
  Description of Artificial Sequence: Synthetic oligonucleotide
gaagctcggccagcaggtg

SEQ ID NO: 949 - DNA, 19 bp, Artificial Sequence
  Description of Artificial Sequence: Synthetic oligonucleotide
aagctcggccagcaggtga

SEQ ID NO: 950 - DNA, 19 bp, Artificial Sequence
  Description of Artificial Sequence: Synthetic oligonucleotide
agctcggccagcaggtgaa

SEQ ID NO: 951 - DNA, 19 bp, Artificial Sequence
  Description of Artificial Sequence: Synthetic oligonucleotide
gctcggccagcaggtgaac

SEQ ID NO: 952 - DNA, 19 bp, Artificial Sequence
  Description of Artificial Sequence: Synthetic oligonucleotide
ctcggccagcaggtgaacc

SEQ ID NO: 953 - DNA, 19 bp, Artificial Sequence
  Description of Artificial Sequence: Synthetic oligonucleotide
tcggccagcaggtgaaccg

SEQ ID NO: 954 - DNA, 19 bp, Artificial Sequence
  Description of Artificial Sequence: Synthetic oligonucleotide
cggccagcaggtgaaccgc

SEQ ID NO: 955 - DNA, 19 bp, Artificial Sequence
  Description of Artificial Sequence: Synthetic oligonucleotide
ggccagcaggtgaaccgca

SEQ ID NO: 956 - DNA, 19 bp, Artificial Sequence
  Description of Artificial Sequence: Synthetic oligonucleotide
gccagcaggtgaaccgcac

SEQ ID NO: 957 - DNA, 19 bp, Artificial Sequence
  Description of Artificial Sequence: Synthetic oligonucleotide
ccagcaggtgaaccgcaca

SEQ ID NO: 958 - DNA, 19 bp, Artificial Sequence
  Description of Artificial Sequence: Synthetic oligonucleotide
cagcaggtgaaccgcacat

SEQ ID NO: 959 - DNA, 19 bp, Artificial Sequence
  Description of Artificial Sequence: Synthetic oligonucleotide
agcaggtgaaccgcacatg

SEQ ID NO: 960 - DNA, 19 bp, Artificial Sequence
  Description of Artificial Sequence: Synthetic oligonucleotide
gcaggtgaaccgcacatgc

SEQ ID NO: 961 - DNA, 19 bp, Artificial Sequence
  Description of Artificial Sequence: Synthetic oligonucleotide
caggtgaaccgcacatgcc

SEQ ID NO: 962 - DNA, 19 bp, Artificial Sequence
  Description of Artificial Sequence: Synthetic oligonucleotide
aggtgaaccgcacatgccc

SEQ ID NO: 963 - DNA, 19 bp, Artificial Sequence
  Description of Artificial Sequence: Synthetic oligonucleotide
ggtgaaccgcacatgcccg

SEQ ID NO: 964 - DNA, 19 bp, Artificial Sequence
  Description of Artificial Sequence: Synthetic oligonucleotide
gtgaaccgcacatgcccgg

SEQ ID NO: 965 - DNA, 19 bp, Artificial Sequence
  Description of Artificial Sequence: Synthetic oligonucleotide
tgaaccgcacatgcccggg

SEQ ID NO: 966 - DNA, 19 bp, Artificial Sequence
  Description of Artificial Sequence: Synthetic oligonucleotide
gaaccgcacatgcccgggc

SEQ ID NO: 967 - DNA, 19 bp, Artificial Sequence
  Description of Artificial Sequence: Synthetic oligonucleotide
aaccgcacatgcccgggct

SEQ ID NO: 968 - DNA, 19 bp, Artificial Sequence
  Description of Artificial Sequence: Synthetic oligonucleotide
accgcacatgcccgggctt

SEQ ID NO: 969 - DNA, 19 bp, Artificial Sequence
  Description of Artificial Sequence: Synthetic oligonucleotide
ccgcacatgcccgggcttc

SEQ ID NO: 970 - DNA, 19 bp, Artificial Sequence
  Description of Artificial Sequence: Synthetic oligonucleotide
cgcacatgcccgggcttcc

SEQ ID NO: 971 - DNA, 19 bp, Artificial Sequence
  Description of Artificial Sequence: Synthetic oligonucleotide
gcacatgcccgggcttcct

SEQ ID NO: 972 - DNA, 19 bp, Artificial Sequence
  Description of Artificial Sequence: Synthetic oligonucleotide
cacatgcccgggcttcctc

SEQ ID NO: 973 - DNA, 19 bp, Artificial Sequence
  Description of Artificial Sequence: Synthetic oligonucleotide
acatgcccgggcttcctcg

SEQ ID NO: 974 - DNA, 19 bp, Artificial Sequence
  Description of Artificial Sequence: Synthetic oligonucleotide
catgcccgggcttcctcgc

SEQ ID NO: 975 - DNA, 19 bp, Artificial Sequence
  Description of Artificial Sequence: Synthetic oligonucleotide
atgcccgggcttcctcgca

SEQ ID NO: 976 - DNA, 19 bp, Artificial Sequence
  Description of Artificial Sequence: Synthetic oligonucleotide
tgcccgggcttcctcgcag

SEQ ID NO: 977 - DNA, 19 bp, Artificial Sequence
  Description of Artificial Sequence: Synthetic oligonucleotide
gcccgggcttcctcgcaga

SEQ ID NO: 978 - DNA, 19 bp, Artificial Sequence
  Description of Artificial Sequence: Synthetic oligonucleotide
cccgggcttcctcgcagac

SEQ ID NO: 979 - DNA, 19 bp, Artificial Sequence
  Description of Artificial Sequence: Synthetic oligonucleotide
ccgggcttcctcgcagacg

SEQ ID NO: 980 - DNA, 19 bp, Artificial Sequence
  Description of Artificial Sequence: Synthetic oligonucleotide
cgggcttcctcgcagacgg

SEQ ID NO: 981 - DNA, 19 bp, Artificial Sequence
  Description of Artificial Sequence: Synthetic oligonucleotide
gggcttcctcgcagacggg

SEQ ID NO: 982 - DNA, 19 bp, Artificial Sequence
  Description of Artificial Sequence: Synthetic oligonucleotide
ggcttcctcgcagacgggg

SEQ ID NO: 983 - DNA, 19 bp, Artificial Sequence
  Description of Artificial Sequence: Synthetic oligonucleotide
gcttcctcgcagacggggg

SEQ ID NO: 984 - DNA, 19 bp, Artificial Sequence
  Description of Artificial Sequence: Synthetic oligonucleotide
cttcctcgcagacgggggt

SEQ ID NO: 985 - DNA, 19 bp, Artificial Sequence
  Description of Artificial Sequence: Synthetic oligonucleotide
ttcctcgcagacgggggtc

SEQ ID NO: 986 - DNA, 19 bp, Artificial Sequence
  Description of Artificial Sequence: Synthetic oligonucleotide
tcctcgcagacgggggtcc

SEQ ID NO: 987 - DNA, 19 bp, Artificial Sequence
  Description of Artificial Sequence: Synthetic oligonucleotide
cctcgcagacgggggtccc

SEQ ID NO: 988 - DNA, 19 bp, Artificial Sequence
  Description of Artificial Sequence: Synthetic oligonucleotide
ctcgcagacgggggtccct

SEQ ID NO: 989 - DNA, 19 bp, Artificial Sequence
  Description of Artificial Sequence: Synthetic oligonucleotide
tcgcagacgggggtccctg

SEQ ID NO: 990 - DNA, 19 bp, Artificial Sequence
  Description of Artificial Sequence: Synthetic oligonucleotide
cgcagacgggggtccctgg

SEQ ID NO: 991 - DNA, 19 bp, Artificial Sequence
  Description of Artificial Sequence: Synthetic oligonucleotide
gcagacgggggtccctggg

SEQ ID NO: 992 - DNA, 19 bp, Artificial Sequence
  Description of Artificial Sequence: Synthetic oligonucleotide
cagacgggggtccctgggt

SEQ ID NO: 993 - DNA, 19 bp, Artificial Sequence
  Description of Artificial Sequence: Synthetic oligonucleotide
agacgggggtccctgggtg

SEQ ID NO: 994 - DNA, 19 bp, Artificial Sequence
  Description of Artificial Sequence: Synthetic oligonucleotide
gacgggggtccctgggtgc

SEQ ID NO: 995 - DNA, 19 bp, Artificial Sequence
  Description of Artificial Sequence: Synthetic oligonucleotide
acgggggtccctgggtgca

SEQ ID NO: 996 - DNA, 19 bp, Artificial Sequence
  Description of Artificial Sequence: Synthetic oligonucleotide
cgggggtccctgggtgcag

SEQ ID NO: 997 - DNA, 19 bp, Artificial Sequence
  Description of Artificial Sequence: Synthetic oligonucleotide
gggggtccctgggtgcagg

SEQ ID NO: 998 - DNA, 19 bp, Artificial Sequence
  Description of Artificial Sequence: Synthetic oligonucleotide
ggggtccctgggtgcagga

SEQ ID NO: 999 - DNA, 19 bp, Artificial Sequence
  Description of Artificial Sequence: Synthetic oligonucleotide
gggtccctgggtgcaggac

SEQ ID NO: 1000 - DNA, 19 bp, Artificial Sequence
  Description of Artificial Sequence: Synthetic oligonucleotide
ggtccctgggtgcaggacg

SEQ ID NO: 1001 - DNA, 19 bp, Artificial Sequence
  Description of Artificial Sequence: Synthetic oligonucleotide
gtccctgggtgcaggacgt

SEQ ID NO: 1002 - DNA, 19 bp, Artificial Sequence
  Description of Artificial Sequence: Synthetic oligonucleotide
tccctgggtgcaggacgtg

SEQ ID NO: 1003 - DNA, 19 bp, Artificial Sequence
  Description of Artificial Sequence: Synthetic oligonucleotide
ccctgggtgcaggacgtgg

SEQ ID NO: 1004 - DNA, 19 bp, Artificial Sequence
  Description of Artificial Sequence: Synthetic oligonucleotide
cctgggtgcaggacgtggc

SEQ ID NO: 1005 - DNA, 19 bp, Artificial Sequence
  Description of Artificial Sequence: Synthetic oligonucleotide
ctgggtgcaggacgtggcc

SEQ ID NO: 1006 - DNA, 19 bp, Artificial Sequence
  Description of Artificial Sequence: Synthetic oligonucleotide
tgggtgcaggacgtggcct

SEQ ID NO: 1007 - DNA, 19 bp, Artificial Sequence
  Description of Artificial Sequence: Synthetic oligonucleotide
gggtgcaggacgtggccta

SEQ ID NO: 1008 - DNA, 19 bp, Artificial Sequence
  Description of Artificial Sequence: Synthetic oligonucleotide
ggtgcaggacgtggcctat

SEQ ID NO: 1009 - DNA, 19 bp, Artificial Sequence
  Description of Artificial Sequence: Synthetic oligonucleotide
gtgcaggacgtggcctatg

SEQ ID NO: 1010 - DNA, 19 bp, Artificial Sequence
  Description of Artificial Sequence: Synthetic oligonucleotide
tgcaggacgtggcctatga

SEQ ID NO: 1011 - DNA, 19 bp, Artificial Sequence
  Description of Artificial Sequence: Synthetic oligonucleotide
gcaggacgtggcctatgac

SEQ ID NO: 1012 - DNA, 19 bp, Artificial Sequence
  Description of Artificial Sequence: Synthetic oligonucleotide
caggacgtggcctatgacc

SEQ ID NO: 1013 - DNA, 19 bp, Artificial Sequence
  Description of Artificial Sequence: Synthetic oligonucleotide
aggacgtggcctatgacct

SEQ ID NO: 1014 - DNA, 19 bp, Artificial Sequence
  Description of Artificial Sequence: Synthetic oligonucleotide
ggacgtggcctatgacctc

SEQ ID NO: 1015 - DNA, 19 bp, Artificial Sequence
  Description of Artificial Sequence: Synthetic oligonucleotide
gacgtggcctatgacctct

SEQ ID NO: 1016 - DNA, 19 bp, Artificial Sequence
  Description of Artificial Sequence: Synthetic oligonucleotide
acgtggcctatgacctctg

SEQ ID NO: 1017 - DNA, 19 bp, Artificial Sequence
  Description of Artificial Sequence: Synthetic oligonucleotide
cgtggcctatgacctctgg

SEQ ID NO: 1018 - DNA, 19 bp, Artificial Sequence
  Description of Artificial Sequence: Synthetic oligonucleotide
gtggcctatgacctctggc

SEQ ID NO: 1019 - DNA, 19 bp, Artificial Sequence
  Description of Artificial Sequence: Synthetic oligonucleotide
tggcctatgacctctggcg

SEQ ID NO: 1020 - DNA, 19 bp, Artificial Sequence
  Description of Artificial Sequence: Synthetic oligonucleotide
ggcctatgacctctggcga

SEQ ID NO: 1021 - DNA, 19 bp, Artificial Sequence
  Description of Artificial Sequence: Synthetic oligonucleotide
gcctatgacctctggcgag

SEQ ID NO: 1022 - DNA, 19 bp, Artificial Sequence
  Description of Artificial Sequence: Synthetic oligonucleotide
cctatgacctctggcgaga

SEQ ID NO: 1023 - DNA, 19 bp, Artificial Sequence
  Description of Artificial Sequence: Synthetic oligonucleotide
ctatgacctctggcgagag

SEQ ID NO: 1024 - DNA, 19 bp, Artificial Sequence
  Description of Artificial Sequence: Synthetic oligonucleotide
tatgacctctggcgagagg

SEQ ID NO: 1025 - DNA, 19 bp, Artificial Sequence
  Description of Artificial Sequence: Synthetic oligonucleotide
atgacctctggcgagagga

SEQ ID NO: 1026 - DNA, 19 bp, Artificial Sequence
  Description of Artificial Sequence: Synthetic oligonucleotide
tgacctctggcgagaggag

SEQ ID NO: 1027 - DNA, 19 bp, Artificial Sequence
  Description of Artificial Sequence: Synthetic oligonucleotide
gacctctggcgagaggaga

SEQ ID NO: 1028 - DNA, 19 bp, Artificial Sequence
  Description of Artificial Sequence: Synthetic oligonucleotide
acctctggcgagaggagaa

SEQ ID NO: 1029 - DNA, 19 bp, Artificial Sequence
  Description of Artificial Sequence: Synthetic oligonucleotide
cctctggcgagaggagaac

SEQ ID NO: 1030 - DNA, 19 bp, Artificial Sequence
  Description of Artificial Sequence: Synthetic oligonucleotide
ctctggcgagaggagaacg

SEQ ID NO: 1031 - DNA, 19 bp, Artificial Sequence
  Description of Artificial Sequence: Synthetic oligonucleotide
tctggcgagaggagaacgg

SEQ ID NO: 1032 - DNA, 19 bp, Artificial Sequence
  Description of Artificial Sequence: Synthetic oligonucleotide
ctggcgagaggagaacggc

SEQ ID NO: 1033 - DNA, 19 bp, Artificial Sequence
  Description of Artificial Sequence: Synthetic oligonucleotide
tggcgagaggagaacggct

SEQ ID NO: 1034 - DNA, 19 bp, Artificial Sequence
  Description of Artificial Sequence: Synthetic oligonucleotide
ggcgagaggagaacggctg

SEQ ID NO: 1035 - DNA, 19 bp, Artificial Sequence
  Description of Artificial Sequence: Synthetic oligonucleotide
gcgagaggagaacggctgt

SEQ ID NO: 1036 - DNA, 19 bp, Artificial Sequence
  Description of Artificial Sequence: Synthetic oligonucleotide
cgagaggagaacggctgtg

SEQ ID NO: 1037 - DNA, 19 bp, Artificial Sequence
  Description of Artificial Sequence: Synthetic oligonucleotide
gagaggagaacggctgtga

SEQ ID NO: 1038 - DNA, 19 bp, Artificial Sequence
  Description of Artificial Sequence: Synthetic oligonucleotide
agaggagaacggctgtgag

SEQ ID NO: 1039 - DNA, 19 bp, Artificial Sequence
  Description of Artificial Sequence: Synthetic oligonucleotide
gaggagaacggctgtgagt

SEQ ID NO: 1040 - DNA, 19 bp, Artificial Sequence
  Description of Artificial Sequence: Synthetic oligonucleotide
aggagaacggctgtgagtg

SEQ ID NO: 1041 - DNA, 19 bp, Artificial Sequence
  Description of Artificial Sequence: Synthetic oligonucleotide
ggagaacggctgtgagtgc

SEQ ID NO: 1042 - DNA, 19 bp, Artificial Sequence
  Description of Artificial Sequence: Synthetic oligonucleotide
gagaacggctgtgagtgca

SEQ ID NO: 1043 - DNA, 19 bp, Artificial Sequence
  Description of Artificial Sequence: Synthetic oligonucleotide
agaacggctgtgagtgcac

SEQ ID NO: 1044 - DNA, 19 bp, Artificial Sequence
  Description of Artificial Sequence: Synthetic oligonucleotide
gaacggctgtgagtgcacc

SEQ ID NO: 1045 - DNA, 19 bp, Artificial Sequence
  Description of Artificial Sequence: Synthetic oligonucleotide
aacggctgtgagtgcacca

SEQ ID NO: 1046 - DNA, 19 bp, Artificial Sequence
  Description of Artificial Sequence: Synthetic oligonucleotide
cagcgtctcttcatatttc

SEQ ID NO: 1047 - DNA, 19 bp, Artificial Sequence
  Description of Artificial Sequence: Synthetic oligonucleotide
gcagcgtctcttcatattt

SEQ ID NO: 1048 - DNA, 19 bp, Artificial Sequence
  Description of Artificial Sequence: Synthetic oligonucleotide
tgcagcgtctcttcatatt

SEQ ID NO: 1049 - DNA, 19 bp, Artificial Sequence
  Description of Artificial Sequence: Synthetic oligonucleotide
ctgcagcgtctcttcatat

SEQ ID NO: 1050 - DNA, 19 bp, Artificial Sequence
  Description of Artificial Sequence: Synthetic oligonucleotide
gctgcagcgtctcttcata

SEQ ID NO: 1051 - DNA, 19 bp, Artificial Sequence
  Description of Artificial Sequence: Synthetic oligonucleotide
agctgcagcgtctcttcat

SEQ ID NO: 1052 - DNA, 19 bp, Artificial Sequence
  Description of Artificial Sequence: Synthetic oligonucleotide
cagctgcagcgtctcttca

SEQ ID NO: 1053 - DNA, 19 bp, Artificial Sequence
  Description of Artificial Sequence: Synthetic oligonucleotide
gcagctgcagcgtctcttc

SEQ ID NO: 1054 - DNA, 19 bp, Artificial Sequence
  Description of Artificial Sequence: Synthetic oligonucleotide
cgcagctgcagcgtctctt

SEQ ID NO: 1055 - DNA, 19 bp, Artificial Sequence
  Description of Artificial Sequence: Synthetic oligonucleotide
ccgcagctgcagcgtctct

SEQ ID NO: 1056 - DNA, 19 bp, Artificial Sequence
  Description of Artificial Sequence: Synthetic oligonucleotide
accgcagctgcagcgtctc

SEQ ID NO: 1057 - DNA, 19 bp, Artificial Sequence
  Description of Artificial Sequence: Synthetic oligonucleotide
caccgcagctgcagcgtct

SEQ ID NO: 1058 - DNA, 19 bp, Artificial Sequence
  Description of Artificial Sequence: Synthetic oligonucleotide
ccaccgcagctgcagcgtc

SEQ ID NO: 1059 - DNA, 19 bp, Artificial Sequence
  Description of Artificial Sequence: Synthetic oligonucleotide
gccaccgcagctgcagcgt

SEQ ID NO: 1060 - DNA, 19 bp, Artificial Sequence
  Description of Artificial Sequence: Synthetic oligonucleotide
cgccaccgcagctgcagcg

SEQ ID NO: 1061 - DNA, 19 bp, Artificial Sequence
  Description of Artificial Sequence: Synthetic oligonucleotide
ccgccaccgcagctgcagc

SEQ ID NO: 1062 - DNA, 19 bp, Artificial Sequence
  Description of Artificial Sequence: Synthetic oligonucleotide
accgccaccgcagctgcag

SEQ ID NO: 1063 - DNA, 19 bp, Artificial Sequence
  Description of Artificial Sequence: Synthetic oligonucleotide
caccgccaccgcagctgca

SEQ ID NO: 1064 - DNA, 19 bp, Artificial Sequence
  Description of Artificial Sequence: Synthetic oligonucleotide
ccaccgccaccgcagctgc

SEQ ID NO: 1065 - DNA, 19 bp, Artificial Sequence
  Description of Artificial Sequence: Synthetic oligonucleotide
gccaccgccaccgcagctg

SEQ ID NO: 1066 - DNA, 19 bp, Artificial Sequence
  Description of Artificial Sequence: Synthetic oligonucleotide
cgccaccgccaccgcagct

SEQ ID NO: 1067 - DNA, 19 bp, Artificial Sequence
  Description of Artificial Sequence: Synthetic oligonucleotide
ccgccaccgccaccgcagc

SEQ ID NO: 1068 - DNA, 19 bp, Artificial Sequence
  Description of Artificial Sequence: Synthetic oligonucleotide
gccgccaccgccaccgcag

SEQ ID NO: 1069 - DNA, 19 bp, Artificial Sequence
  Description of Artificial Sequence: Synthetic oligonucleotide
ggccgccaccgccaccgca

SEQ ID NO: 1070 - DNA, 19 bp, Artificial Sequence
  Description of Artificial Sequence: Synthetic oligonucleotide
tggccgccaccgccaccgc

SEQ ID NO: 1071 - DNA, 19 bp, Artificial Sequence
  Description of Artificial Sequence: Synthetic oligonucleotide
gtggccgccaccgccaccg

SEQ ID NO: 1072 - DNA, 19 bp, Artificial Sequence
  Description of Artificial Sequence: Synthetic oligonucleotide
agtggccgccaccgccacc

SEQ ID NO: 1073 - DNA, 19 bp, Artificial Sequence
  Description of Artificial Sequence: Synthetic oligonucleotide
cagtggccgccaccgccac

SEQ ID NO: 1074 - DNA, 19 bp, Artificial Sequence
  Description of Artificial Sequence: Synthetic oligonucleotide
gcagtggccgccaccgcca

SEQ ID NO: 1075 - DNA, 19 bp, Artificial Sequence
  Description of Artificial Sequence: Synthetic oligonucleotide
tgcagtggccgccaccgcc

SEQ ID NO: 1076 - DNA, 19 bp, Artificial Sequence
  Description of Artificial Sequence: Synthetic oligonucleotide
ctgcagtggccgccaccgc

SEQ ID NO: 1077 - DNA, 19 bp, Artificial Sequence
  Description of Artificial Sequence: Synthetic oligonucleotide
gctgcagtggccgccaccg

SEQ ID NO: 1078 - DNA, 19 bp, Artificial Sequence
  Description of Artificial Sequence: Synthetic oligonucleotide
agctgcagtggccgccacc

SEQ ID NO: 1079 - DNA, 19 bp, Artificial Sequence
  Description of Artificial Sequence: Synthetic oligonucleotide
gagctgcagtggccgccac

SEQ ID NO: 1080 - DNA, 19 bp, Artificial Sequence
  Description of Artificial Sequence: Synthetic oligonucleotide
tgagctgcagtggccgcca

SEQ ID NO: 1081 - DNA, 19 bp, Artificial Sequence
  Description of Artificial Sequence: Synthetic oligonucleotide
ctgagctgcagtggccgcc

SEQ ID NO: 1082 - DNA, 19 bp, Artificial Sequence
  Description of Artificial Sequence: Synthetic oligonucleotide
tctgagctgcagtggccgc

SEQ ID NO: 1083 - DNA, 19 bp, Artificial Sequence
  Description of Artificial Sequence: Synthetic oligonucleotide
ctctgagctgcagtggccg

SEQ ID NO: 1084 - DNA, 19 bp, Artificial Sequence
  Description of Artificial Sequence: Synthetic oligonucleotide
gctctgagctgcagtggcc

SEQ ID NO: 1085 - DNA, 19 bp, Artificial Sequence
  Description of Artificial Sequence: Synthetic oligonucleotide
cgctctgagctgcagtggc

SEQ ID NO: 1086 - DNA, 19 bp, Artificial Sequence
  Description of Artificial Sequence: Synthetic oligonucleotide
ccgctctgagctgcagtgg

SEQ ID NO: 1087 - DNA, 19 bp, Artificial Sequence
  Description of Artificial Sequence: Synthetic oligonucleotide
gccgctctgagctgcagtg

SEQ ID NO: 1088 - DNA, 19 bp, Artificial Sequence
  Description of Artificial Sequence: Synthetic oligonucleotide
cgccgctctgagctgcagt

SEQ ID NO: 1089 - DNA, 19 bp, Artificial Sequence
  Description of Artificial Sequence: Synthetic oligonucleotide
gcgccgctctgagctgcag

SEQ ID NO: 1090 - DNA, 19 bp, Artificial Sequence
  Description of Artificial Sequence: Synthetic oligonucleotide
tgcgccgctctgagctgca

SEQ ID NO: 1091 - DNA, 19 bp, Artificial Sequence
  Description of Artificial Sequence: Synthetic oligonucleotide
gtgcgccgctctgagctgc

SEQ ID NO: 1092 - DNA, 19 bp, Artificial Sequence
  Description of Artificial Sequence: Synthetic oligonucleotide
cgtgcgccgctctgagctg

SEQ ID NO: 1093 - DNA, 19 bp, Artificial Sequence
  Description of Artificial Sequence: Synthetic oligonucleotide
gcgtgcgccgctctgagct

SEQ ID NO: 1094 - DNA, 19 bp, Artificial Sequence
  Description of Artificial Sequence: Synthetic oligonucleotide
cgcgtgcgccgctctgagc

SEQ ID NO: 1095 - DNA, 19 bp, Artificial Sequence
  Description of Artificial Sequence: Synthetic oligonucleotide
ccgcgtgcgccgctctgag

SEQ ID NO: 1096 - DNA, 19 bp, Artificial Sequence
  Description of Artificial Sequence: Synthetic oligonucleotide
gccgcgtgcgccgctctga

SEQ ID NO: 1097 - DNA, 19 bp, Artificial Sequence
  Description of Artificial Sequence: Synthetic oligonucleotide
cgccgcgtgcgccgctctg

SEQ ID NO: 1098 - DNA, 19 bp, Artificial Sequence
  Description of Artificial Sequence: Synthetic oligonucleotide
ccgccgcgtgcgccgctct

SEQ ID NO: 1099 - DNA, 19 bp, Artificial Sequence
  Description of Artificial Sequence: Synthetic oligonucleotide
gccgccgcgtgcgccgctc

SEQ ID NO: 1100 - DNA, 19 bp, Artificial Sequence
  Description of Artificial Sequence: Synthetic oligonucleotide
ggccgccgcgtgcgccgct

SEQ ID NO: 1101 - DNA, 19 bp, Artificial Sequence
  Description of Artificial Sequence: Synthetic oligonucleotide
cggccgccgcgtgcgccgc

SEQ ID NO: 1102 - DNA, 19 bp, Artificial Sequence
  Description of Artificial Sequence: Synthetic oligonucleotide
ccggccgccgcgtgcgccg

SEQ ID NO: 1103 - DNA, 19 bp, Artificial Sequence
  Description of Artificial Sequence: Synthetic oligonucleotide
cccggccgccgcgtgcgcc

SEQ ID NO: 1104 - DNA, 19 bp, Artificial Sequence
  Description of Artificial Sequence: Synthetic oligonucleotide
ccccggccgccgcgtgcgc

SEQ ID NO: 1105 - DNA, 19 bp, Artificial Sequence
  Description of Artificial Sequence: Synthetic oligonucleotide
gccccggccgccgcgtgcg

SEQ ID NO: 1106 - DNA, 19 bp, Artificial Sequence
  Description of Artificial Sequence: Synthetic oligonucleotide
cgccccggccgccgcgtgc

SEQ ID NO: 1107 - DNA, 19 bp, Artificial Sequence
  Description of Artificial Sequence: Synthetic oligonucleotide
ccgccccggccgccgcgtg

SEQ ID NO: 1108 - DNA, 19 bp, Artificial Sequence
  Description of Artificial Sequence: Synthetic oligonucleotide
cccgccccggccgccgcgt

SEQ ID NO: 1109 - DNA, 19 bp, Artificial Sequence
  Description of Artificial Sequence: Synthetic oligonucleotide
tcccgccccggccgccgcg

SEQ ID NO: 1110 - DNA, 19 bp, Artificial Sequence
  Description of Artificial Sequence: Synthetic oligonucleotide
gtcccgccccggccgccgc

SEQ ID NO: 1111 - DNA, 19 bp, Artificial Sequence
  Description of Artificial Sequence: Synthetic oligonucleotide
cgtcccgccccggccgccg

SEQ ID NO: 1112 - DNA, 19 bp, Artificial Sequence
  Description of Artificial Sequence: Synthetic oligonucleotide
gcgtcccgccccggccgcc

SEQ ID NO: 1113 - DNA, 19 bp, Artificial Sequence
  Description of Artificial Sequence: Synthetic oligonucleotide
cgcgtcccgccccggccgc

SEQ ID NO: 1114 - DNA, 19 bp, Artificial Sequence
  Description of Artificial Sequence: Synthetic oligonucleotide
ccgcgtcccgccccggccg

SEQ ID NO: 1115 - DNA, 19 bp, Artificial Sequence
  Description of Artificial Sequence: Synthetic oligonucleotide
cccgcgtcccgccccggcc

SEQ ID NO: 1116 - DNA, 19 bp, Artificial Sequence
  Description of Artificial Sequence: Synthetic oligonucleotide
ccccgcgtcccgccccggc

SEQ ID NO: 1117 - DNA, 19 bp, Artificial Sequence
  Description of Artificial Sequence: Synthetic oligonucleotide
gccccgcgtcccgccccgg

SEQ ID NO: 1118 - DNA, 19 bp, Artificial Sequence
  Description of Artificial Sequence: Synthetic oligonucleotide
ggccccgcgtcccgccccg

SEQ ID NO: 1119 - DNA, 19 bp, Artificial Sequence
  Description of Artificial Sequence: Synthetic oligonucleotide
cggccccgcgtcccgcccc

SEQ ID NO: 1120 - DNA, 19 bp, Artificial Sequence
  Description of Artificial Sequence: Synthetic oligonucleotide
ccggccccgcgtcccgccc

SEQ ID NO: 1121 - DNA, 19 bp, Artificial Sequence
  Description of Artificial Sequence: Synthetic oligonucleotide
cccggccccgcgtcccgcc

SEQ ID NO: 1122 - DNA, 19 bp, Artificial Sequence
  Description of Artificial Sequence: Synthetic oligonucleotide
gcccggccccgcgtcccgc

SEQ ID NO: 1123 - DNA, 19 bp, Artificial Sequence
  Description of Artificial Sequence: Synthetic oligonucleotide
cgcccggccccgcgtcccg

SEQ ID NO: 1124 - DNA, 19 bp, Artificial Sequence
  Description of Artificial Sequence: Synthetic oligonucleotide
gcgcccggccccgcgtccc

SEQ ID NO: 1125 - DNA, 19 bp, Artificial Sequence
  Description of Artificial Sequence: Synthetic oligonucleotide
cgcgcccggccccgcgtcc

SEQ ID NO: 1126 - DNA, 19 bp, Artificial Sequence
  Description of Artificial Sequence: Synthetic oligonucleotide
ccgcgcccggccccgcgtc

SEQ ID NO: 1127 - DNA, 19 bp, Artificial Sequence
  Description of Artificial Sequence: Synthetic oligonucleotide
tccgcgcccggccccgcgt

SEQ ID NO: 1128 - DNA, 19 bp, Artificial Sequence
  Description of Artificial Sequence: Synthetic oligonucleotide
ctccgcgcccggccccgcg

SEQ ID NO: 1129 - DNA, 19 bp, Artificial Sequence
  Description of Artificial Sequence: Synthetic oligonucleotide
tctccgcgcccggccccgc

SEQ ID NO: 1130 - DNA, 19 bp, Artificial Sequence
  Description of Artificial Sequence: Synthetic oligonucleotide
ttctccgcgcccggccccg

SEQ ID NO: 1131 - DNA, 19 bp, Artificial Sequence
  Description of Artificial Sequence: Synthetic oligonucleotide
cttctccgcgcccggcccc

SEQ ID NO: 1132 - DNA, 19 bp, Artificial Sequence
  Description of Artificial Sequence: Synthetic oligonucleotide
acttctccgcgcccggccc

SEQ ID NO: 1133 - DNA, 19 bp, Artificial Sequence
  Description of Artificial Sequence: Synthetic oligonucleotide
gacttctccgcgcccggcc

SEQ ID NO: 1134 - DNA, 19 bp, Artificial Sequence
  Description of Artificial Sequence: Synthetic oligonucleotide
cgacttctccgcgcccggc

SEQ ID NO: 1135 - DNA, 19 bp, Artificial Sequence
  Description of Artificial Sequence: Synthetic oligonucleotide
ccgacttctccgcgcccgg

SEQ ID NO: 1136 - DNA, 19 bp, Artificial Sequence
  Description of Artificial Sequence: Synthetic oligonucleotide
cccgacttctccgcgcccg

SEQ ID NO: 1137 - DNA, 19 bp, Artificial Sequence
  Description of Artificial Sequence: Synthetic oligonucleotide
ccccgacttctccgcgccc

SEQ ID NO: 1138 - DNA, 19 bp, Artificial Sequence
  Description of Artificial Sequence: Synthetic oligonucleotide
gccccgacttctccgcgcc

SEQ ID NO: 1139 - DNA, 19 bp, Artificial Sequence
  Description of Artificial Sequence: Synthetic oligonucleotide
cgccccgacttctccgcgc

SEQ ID NO: 1140 - DNA, 19 bp, Artificial Sequence
  Description of Artificial Sequence: Synthetic oligonucleotide
ccgccccgacttctccgcg

SEQ ID NO: 1141 - DNA, 19 bp, Artificial Sequence
  Description of Artificial Sequence: Synthetic oligonucleotide
cccgccccgacttctccgc

SEQ ID NO: 1142 - DNA, 19 bp, Artificial Sequence
  Description of Artificial Sequence: Synthetic oligonucleotide
gcccgccccgacttctccg

SEQ ID NO: 1143 - DNA, 19 bp, Artificial Sequence
  Description of Artificial Sequence: Synthetic oligonucleotide
cgcccgccccgacttctcc

SEQ ID NO: 1144 - DNA, 19 bp, Artificial Sequence
  Description of Artificial Sequence: Synthetic oligonucleotide
ccgcccgccccgacttctc

SEQ ID NO: 1145 - DNA, 19 bp, Artificial Sequence
  Description of Artificial Sequence: Synthetic oligonucleotide
gccgcccgccccgacttct

SEQ ID NO: 1146 - DNA, 19 bp, Artificial Sequence
  Description of Artificial Sequence: Synthetic oligonucleotide
tgccgcccgccccgacttc

SEQ ID NO: 1147 - DNA, 19 bp, Artificial Sequence
  Description of Artificial Sequence: Synthetic oligonucleotide
ctgccgcccgccccgactt

SEQ ID NO: 1148 - DNA, 19 bp, Artificial Sequence
  Description of Artificial Sequence: Synthetic oligonucleotide
tctgccgcccgccccgact

SEQ ID NO: 1149 - DNA, 19 bp, Artificial Sequence
  Description of Artificial Sequence: Synthetic oligonucleotide
ctctgccgcccgccccgac

SEQ ID NO: 1150 - DNA, 19 bp, Artificial Sequence
  Description of Artificial Sequence: Synthetic oligonucleotide
tctctgccgcccgccccga

SEQ ID NO: 1151 - DNA, 19 bp, Artificial Sequence
  Description of Artificial Sequence: Synthetic oligonucleotide
ctctctgccgcccgccccg

SEQ ID NO: 1152 - DNA, 19 bp, Artificial Sequence
  Description of Artificial Sequence: Synthetic oligonucleotide
cctctctgccgcccgcccc

SEQ ID NO: 1153 - DNA, 19 bp, Artificial Sequence
  Description of Artificial Sequence: Synthetic oligonucleotide
gcctctctgccgcccgccc

SEQ ID NO: 1154 - DNA, 19 bp, Artificial Sequence
  Description of Artificial Sequence: Synthetic oligonucleotide
ggcctctctgccgcccgcc

SEQ ID NO: 1155 - DNA, 19 bp, Artificial Sequence
  Description of Artificial Sequence: Synthetic oligonucleotide
cggcctctctgccgcccgc

SEQ ID NO: 1156 - DNA, 19 bp, Artificial Sequence
  Description of Artificial Sequence: Synthetic oligonucleotide
ccggcctctctgccgcccg

SEQ ID NO: 1157 - DNA, 19 bp, Artificial Sequence
  Description of Artificial Sequence: Synthetic oligonucleotide
cccggcctctctgccgccc

SEQ ID NO: 1158 - DNA, 19 bp, Artificial Sequence
  Description of Artificial Sequence: Synthetic oligonucleotide
tcccggcctctctgccgcc

SEQ ID NO: 1159 - DNA, 19 bp, Artificial Sequence
  Description of Artificial Sequence: Synthetic oligonucleotide
gtcccggcctctctgccgc

SEQ ID NO: 1160 - DNA, 19 bp, Artificial Sequence
  Description of Artificial Sequence: Synthetic oligonucleotide
cgtcccggcctctctgccg

SEQ ID NO: 1161 - DNA, 19 bp, Artificial Sequence
  Description of Artificial Sequence: Synthetic oligonucleotide
gcgtcccggcctctctgcc

SEQ ID NO: 1162 - DNA, 19 bp, Artificial Sequence
  Description of Artificial Sequence: Synthetic oligonucleotide
cgcgtcccggcctctctgc

SEQ ID NO: 1163 - DNA, 19 bp, Artificial Sequence
  Description of Artificial Sequence: Synthetic oligonucleotide
ccgcgtcccggcctctctg

SEQ ID NO: 1164 - DNA, 19 bp, Artificial Sequence
  Description of Artificial Sequence: Synthetic oligonucleotide
tccgcgtcccggcctctct

SEQ ID NO: 1165 - DNA, 19 bp, Artificial Sequence
  Description of Artificial Sequence: Synthetic oligonucleotide
gtccgcgtcccggcctctc

SEQ ID NO: 1166 - DNA, 19 bp, Artificial Sequence
  Description of Artificial Sequence: Synthetic oligonucleotide
ggtccgcgtcccggcctct

SEQ ID NO: 1167 - DNA, 19 bp, Artificial Sequence
  Description of Artificial Sequence: Synthetic oligonucleotide
cggtccgcgtcccggcctc

SEQ ID NO: 1168 - DNA, 19 bp, Artificial Sequence
  Description of Artificial Sequence: Synthetic oligonucleotide
ccggtccgcgtcccggcct

SEQ ID NO: 1169 - DNA, 19 bp, Artificial Sequence
  Description of Artificial Sequence: Synthetic oligonucleotide
cccggtccgcgtcccggcc

SEQ ID NO: 1170 - DNA, 19 bp, Artificial Sequence
  Description of Artificial Sequence: Synthetic oligonucleotide
gcccggtccgcgtcccggc

SEQ ID NO: 1171 - DNA, 19 bp, Artificial Sequence
  Description of Artificial Sequence: Synthetic oligonucleotide
ggcccggtccgcgtcccgg

SEQ ID NO: 1172 - DNA, 19 bp, Artificial Sequence
  Description of Artificial Sequence: Synthetic oligonucleotide
cggcccggtccgcgtcccg

SEQ ID NO: 1173 - DNA, 19 bp, Artificial Sequence
  Description of Artificial Sequence: Synthetic oligonucleotide
ccggcccggtccgcgtccc

SEQ ID NO: 1174 - DNA, 19 bp, Artificial Sequence
  Description of Artificial Sequence: Synthetic oligonucleotide
cccggcccggtccgcgtcc

SEQ ID NO: 1175 - DNA, 19 bp, Artificial Sequence
  Description of Artificial Sequence: Synthetic oligonucleotide
ccccggcccggtccgcgtc

SEQ ID NO: 1176 - DNA, 19 bp, Artificial Sequence
  Description of Artificial Sequence: Synthetic oligonucleotide
gccccggcccggtccgcgt

SEQ ID NO: 1177 - DNA, 19 bp, Artificial Sequence
  Description of Artificial Sequence: Synthetic oligonucleotide
cgccccggcccggtccgcg

SEQ ID NO: 1178 - DNA, 19 bp, Artificial Sequence
  Description of Artificial Sequence: Synthetic oligonucleotide
gcgccccggcccggtccgc

SEQ ID NO: 1179 - DNA, 19 bp, Artificial Sequence
  Description of Artificial Sequence: Synthetic oligonucleotide
ggcgccccggcccggtccg

SEQ ID NO: 1180 - DNA, 19 bp, Artificial Sequence
  Description of Artificial Sequence: Synthetic oligonucleotide
gggcgccccggcccggtcc

SEQ ID NO: 1181 - DNA, 19 bp, Artificial Sequence
  Description of Artificial Sequence: Synthetic oligonucleotide
tgggcgccccggcccggtc

SEQ ID NO: 1182 - DNA, 19 bp, Artificial Sequence
  Description of Artificial Sequence: Synthetic oligonucleotide
gtgggcgccccggcccggt

SEQ ID NO: 1183 - DNA, 19 bp, Artificial Sequence
  Description of Artificial Sequence: Synthetic oligonucleotide
tgtgggcgccccggcccgg

SEQ ID NO: 1184 - DNA, 19 bp, Artificial Sequence
  Description of Artificial Sequence: Synthetic oligonucleotide
ctgtgggcgccccggcccg

SEQ ID NO: 1185 - DNA, 19 bp, Artificial Sequence
  Description of Artificial Sequence: Synthetic oligonucleotide
gctgtgggcgccccggccc

SEQ ID NO: 1186 - DNA, 19 bp, Artificial Sequence
  Description of Artificial Sequence: Synthetic oligonucleotide
ggctgtgggcgccccggcc

SEQ ID NO: 1187 - DNA, 19 bp, Artificial Sequence
  Description of Artificial Sequence: Synthetic oligonucleotide
cggctgtgggcgccccggc

SEQ ID NO: 1188 - DNA, 19 bp, Artificial Sequence
  Description of Artificial Sequence: Synthetic oligonucleotide
gcggctgtgggcgccccgg

SEQ ID NO: 1189 - DNA, 19 bp, Artificial Sequence
  Description of Artificial Sequence: Synthetic oligonucleotide
ggcggctgtgggcgccccg

SEQ ID NO: 1190 - DNA, 19 bp, Artificial Sequence
  Description of Artificial Sequence: Synthetic oligonucleotide
gggcggctgtgggcgcccc

SEQ ID NO: 1191 - DNA, 19 bp, Artificial Sequence
  Description of Artificial Sequence: Synthetic oligonucleotide
cgggcggctgtgggcgccc

SEQ ID NO: 1192 - DNA, 19 bp, Artificial Sequence
  Description of Artificial Sequence: Synthetic oligonucleotide
tcgggcggctgtgggcgcc

SEQ ID NO: 1193 - DNA, 19 bp, Artificial Sequence
  Description of Artificial Sequence: Synthetic oligonucleotide
gtcgggcggctgtgggcgc

SEQ ID NO: 1194 - DNA, 19 bp, Artificial Sequence
  Description of Artificial Sequence: Synthetic oligonucleotide
cgtcgggcggctgtgggcg

SEQ ID NO: 1195 - DNA, 19 bp, Artificial Sequence
  Description of Artificial Sequence: Synthetic oligonucleotide
ccgtcgggcggctgtgggc

SEQ ID NO: 1196 - DNA, 19 bp, Artificial Sequence
  Description of Artificial Sequence: Synthetic oligonucleotide
gccgtcgggcggctgtggg

SEQ ID NO: 1197 - DNA, 19 bp, Artificial Sequence
  Description of Artificial Sequence: Synthetic oligonucleotide
cgccgtcgggcggctgtgg

SEQ ID NO: 1198 - DNA, 19 bp, Artificial Sequence
  Description of Artificial Sequence: Synthetic oligonucleotide
gcgccgtcgggcggctgtg

SEQ ID NO: 1199 - DNA, 19 bp, Artificial Sequence
  Description of Artificial Sequence: Synthetic oligonucleotide
ggcgccgtcgggcggctgt

SEQ ID NO: 1200 - DNA, 19 bp, Artificial Sequence
  Description of Artificial Sequence: Synthetic oligonucleotide
gggcgccgtcgggcggctg

SEQ ID NO: 1201 - DNA, 19 bp, Artificial Sequence
  Description of Artificial Sequence: Synthetic oligonucleotide
tgggcgccgtcgggcggct

SEQ ID NO: 1202 - DNA, 19 bp, Artificial Sequence
  Description of Artificial Sequence: Synthetic oligonucleotide
ctgggcgccgtcgggcggc

SEQ ID NO: 1203 - DNA, 19 bp, Artificial Sequence
  Description of Artificial Sequence: Synthetic oligonucleotide
tctgggcgccgtcgggcgg

SEQ ID NO: 1204 - DNA, 19 bp, Artificial Sequence
  Description of Artificial Sequence: Synthetic oligonucleotide
ctctgggcgccgtcgggcg

SEQ ID NO: 1205 - DNA, 19 bp, Artificial Sequence
  Description of Artificial Sequence: Synthetic oligonucleotide
tctctgggcgccgtcgggc

SEQ ID NO: 1206 - DNA, 19 bp, Artificial Sequence
  Description of Artificial Sequence: Synthetic oligonucleotide
ctctctgggcgccgtcggg

SEQ ID NO: 1207 - DNA, 19 bp, Artificial Sequence
  Description of Artificial Sequence: Synthetic oligonucleotide
gctctctgggcgccgtcgg

SEQ ID NO: 1208 - DNA, 19 bp, Artificial Sequence
  Description of Artificial Sequence: Synthetic oligonucleotide
cgctctctgggcgccgtcg

SEQ ID NO: 1209 - DNA, 19 bp, Artificial Sequence
  Description of Artificial Sequence: Synthetic oligonucleotide
gcgctctctgggcgccgtc

SEQ ID NO: 1210 - DNA, 19 bp, Artificial Sequence
  Description of Artificial Sequence: Synthetic oligonucleotide
cgcgctctctgggcgccgt

SEQ ID NO: 1211 - DNA, 19 bp, Artificial Sequence
  Description of Artificial Sequence: Synthetic oligonucleotide
gcgcgctctctgggcgccg

SEQ ID NO: 1212 - DNA, 19 bp, Artificial Sequence
  Description of Artificial Sequence: Synthetic oligonucleotide
cgcgcgctctctgggcgcc

SEQ ID NO: 1213 - DNA, 19 bp, Artificial Sequence
  Description of Artificial Sequence: Synthetic oligonucleotide
gcgcgcgctctctgggcgc

SEQ ID NO: 1214 - DNA, 19 bp, Artificial Sequence
  Description of Artificial Sequence: Synthetic oligonucleotide
ggcgcgcgctctctgggcg

SEQ ID NO: 1215 - DNA, 19 bp, Artificial Sequence
  Description of Artificial Sequence: Synthetic oligonucleotide
gggcgcgcgctctctgggc

SEQ ID NO: 1216 - DNA, 19 bp, Artificial Sequence
  Description of Artificial Sequence: Synthetic oligonucleotide
ggggcgcgcgctctctggg

SEQ ID NO: 1217 - DNA, 19 bp, Artificial Sequence
  Description of Artificial Sequence: Synthetic oligonucleotide
cggggcgcgcgctctctgg

SEQ ID NO: 1218 - DNA, 19 bp, Artificial Sequence
  Description of Artificial Sequence: Synthetic oligonucleotide
gcggggcgcgcgctctctg

SEQ ID NO: 1219 - DNA, 19 bp, Artificial Sequence
  Description of Artificial Sequence: Synthetic oligonucleotide
tgcggggcgcgcgctctct

SEQ ID NO: 1220 - DNA, 19 bp, Artificial Sequence
  Description of Artificial Sequence: Synthetic oligonucleotide
ctgcggggcgcgcgctctc

SEQ ID NO: 1221 - DNA, 19 bp, Artificial Sequence
  Description of Artificial Sequence: Synthetic oligonucleotide
gctgcggggcgcgcgctct

SEQ ID NO: 1222 - DNA, 19 bp, Artificial Sequence
  Description of Artificial Sequence: Synthetic oligonucleotide
ggctgcggggcgcgcgctc

SEQ ID NO: 1223 - DNA, 19 bp, Artificial Sequence
  Description of Artificial Sequence: Synthetic oligonucleotide
gggctgcggggcgcgcgct

SEQ ID NO: 1224 - DNA, 19 bp, Artificial Sequence
  Description of Artificial Sequence: Synthetic oligonucleotide
ggggctgcggggcgcgcgc

SEQ ID NO: 1225 - DNA, 19 bp, Artificial Sequence
  Description of Artificial Sequence: Synthetic oligonucleotide
cggggctgcggggcgcgcg

SEQ ID NO: 1226 - DNA, 19 bp, Artificial Sequence
  Description of Artificial Sequence: Synthetic oligonucleotide
gcggggctgcggggcgcgc

SEQ ID NO: 1227 - DNA, 19 bp, Artificial Sequence
  Description of Artificial Sequence: Synthetic oligonucleotide
cgcggggctgcggggcgcg

SEQ ID NO: 1228 - DNA, 19 bp, Artificial Sequence
  Description of Artificial Sequence: Synthetic oligonucleotide
gcgcggggctgcggggcgc

SEQ ID NO: 1229 - DNA, 19 bp, Artificial Sequence
  Description of Artificial Sequence: Synthetic oligonucleotide
ggcgcggggctgcggggcg

SEQ ID NO: 1230 - DNA, 19 bp, Artificial Sequence
  Description of Artificial Sequence: Synthetic oligonucleotide
aggcgcggggctgcggggc

SEQ ID NO: 1231 - DNA, 19 bp, Artificial Sequence
  Description of Artificial Sequence: Synthetic oligonucleotide
taggcgcggggctgcgggg

SEQ ID NO: 1232 - DNA, 19 bp, Artificial Sequence
  Description of Artificial Sequence: Synthetic oligonucleotide
ctaggcgcggggctgcggg

SEQ ID NO: 1233 - DNA, 19 bp, Artificial Sequence
  Description of Artificial Sequence: Synthetic oligonucleotide
gctaggcgcggggctgcgg

SEQ ID NO: 1234 - DNA, 19 bp, Artificial Sequence
  Description of Artificial Sequence: Synthetic oligonucleotide
ggctaggcgcggggctgcg

SEQ ID NO: 1235 - DNA, 19 bp, Artificial Sequence
  Description of Artificial Sequence: Synthetic oligonucleotide
gggctaggcgcggggctgc

SEQ ID NO: 1236 - DNA, 19 bp, Artificial Sequence
  Description of Artificial Sequence: Synthetic oligonucleotide
cgggctaggcgcggggctg

SEQ ID NO: 1237 - DNA, 19 bp, Artificial Sequence
  Description of Artificial Sequence: Synthetic oligonucleotide
gcgggctaggcgcggggct

SEQ ID NO: 1238 - DNA, 19 bp, Artificial Sequence
  Description of Artificial Sequence: Synthetic oligonucleotide
ggcgggctaggcgcggggc

SEQ ID NO: 1239 - DNA, 19 bp, Artificial Sequence
  Description of Artificial Sequence: Synthetic oligonucleotide
cggcgggctaggcgcgggg

SEQ ID NO: 1240 - DNA, 19 bp, Artificial Sequence
  Description of Artificial Sequence: Synthetic oligonucleotide
ccggcgggctaggcgcggg

SEQ ID NO: 1241 - DNA, 19 bp, Artificial Sequence
  Description of Artificial Sequence: Synthetic oligonucleotide
cccggcgggctaggcgcgg

SEQ ID NO: 1242 - DNA, 19 bp, Artificial Sequence
  Description of Artificial Sequence: Synthetic oligonucleotide
gcccggcgggctaggcgcg

SEQ ID NO: 1243 - DNA, 19 bp, Artificial Sequence
  Description of Artificial Sequence: Synthetic oligonucleotide
tgcccggcgggctaggcgc

SEQ ID NO: 1244 - DNA, 19 bp, Artificial Sequence
  Description of Artificial Sequence: Synthetic oligonucleotide
atgcccggcgggctaggcg

SEQ ID NO: 1245 - DNA, 19 bp, Artificial Sequence
  Description of Artificial Sequence: Synthetic oligonucleotide
catgcccggcgggctaggc

SEQ ID NO: 1246 - DNA, 19 bp, Artificial Sequence
  Description of Artificial Sequence: Synthetic oligonucleotide
ccatgcccggcgggctagg

SEQ ID NO: 1247 - DNA, 19 bp, Artificial Sequence
  Description of Artificial Sequence: Synthetic oligonucleotide
cccatgcccggcgggctag

SEQ ID NO: 1248 - DNA, 19 bp, Artificial Sequence
  Description of Artificial Sequence: Synthetic oligonucleotide
ccccatgcccggcgggcta

SEQ ID NO: 1249 - DNA, 19 bp, Artificial Sequence
  Description of Artificial Sequence: Synthetic oligonucleotide
gccccatgcccggcgggct

SEQ ID NO: 1250 - DNA, 19 bp, Artificial Sequence
  Description of Artificial Sequence: Synthetic oligonucleotide
cgccccatgcccggcgggc

SEQ ID NO: 1251 - DNA, 19 bp, Artificial Sequence
  Description of Artificial Sequence: Synthetic oligonucleotide
gcgccccatgcccggcggg

SEQ ID NO: 1252 - DNA, 19 bp, Artificial Sequence
  Description of Artificial Sequence: Synthetic oligonucleotide
cgcgccccatgcccggcgg

SEQ ID NO: 1253 - DNA, 19 bp, Artificial Sequence
  Description of Artificial Sequence: Synthetic oligonucleotide
gcgcgccccatgcccggcg

SEQ ID NO: 1254 - DNA, 19 bp, Artificial Sequence
  Description of Artificial Sequence: Synthetic oligonucleotide
cgcgcgccccatgcccggc

SEQ ID NO: 1255 - DNA, 19 bp, Artificial Sequence
  Description of Artificial Sequence: Synthetic oligonucleotide
ccgcgcgccccatgcccgg

SEQ ID NO: 1256 - DNA, 19 bp, Artificial Sequence
  Description of Artificial Sequence: Synthetic oligonucleotide
gccgcgcgccccatgcccg

SEQ ID NO: 1257 - DNA, 19 bp, Artificial Sequence
  Description of Artificial Sequence: Synthetic oligonucleotide
tgccgcgcgccccatgccc

SEQ ID NO: 1258 - DNA, 19 bp, Artificial Sequence
  Description of Artificial Sequence: Synthetic oligonucleotide
ctgccgcgcgccccatgcc

SEQ ID NO: 1259 - DNA, 19 bp, Artificial Sequence
  Description of Artificial Sequence: Synthetic oligonucleotide
gctgccgcgcgccccatgc

SEQ ID NO: 1260 - DNA, 19 bp, Artificial Sequence
  Description of Artificial Sequence: Synthetic oligonucleotide
ggctgccgcgcgccccatg

SEQ ID NO: 1261 - DNA, 19 bp, Artificial Sequence
  Description of Artificial Sequence: Synthetic oligonucleotide
cggctgccgcgcgccccat

SEQ ID NO: 1262 - DNA, 19 bp, Artificial Sequence
  Description of Artificial Sequence: Synthetic oligonucleotide
gcggctgccgcgcgcccca

SEQ ID NO: 1263 - DNA, 19 bp, Artificial Sequence
  Description of Artificial Sequence: Synthetic oligonucleotide
ggcggctgccgcgcgcccc

SEQ ID NO: 1264 - DNA, 19 bp, Artificial Sequence
  Description of Artificial Sequence: Synthetic oligonucleotide
aggcggctgccgcgcgccc

SEQ ID NO: 1265 - DNA, 19 bp, Artificial Sequence
  Description of Artificial Sequence: Synthetic oligonucleotide
caggcggctgccgcgcgcc

SEQ ID NO: 1266 - DNA, 19 bp, Artificial Sequence
  Description of Artificial Sequence: Synthetic oligonucleotide
tcaggcggctgccgcgcgc

SEQ ID NO: 1267 - DNA, 19 bp, Artificial Sequence
  Description of Artificial Sequence: Synthetic oligonucleotide
ttcaggcggctgccgcgcg

SEQ ID NO: 1268 - DNA, 19 bp, Artificial Sequence
  Description of Artificial Sequence: Synthetic oligonucleotide
cttcaggcggctgccgcgc

SEQ ID NO: 1269 - DNA, 19 bp, Artificial Sequence
  Description of Artificial Sequence: Synthetic oligonucleotide
gcttcaggcggctgccgcg

SEQ ID NO: 1270 - DNA, 19 bp, Artificial Sequence
  Description of Artificial Sequence: Synthetic oligonucleotide
ggcttcaggcggctgccgc

SEQ ID NO: 1271 - DNA, 19 bp, Artificial Sequence
  Description of Artificial Sequence: Synthetic oligonucleotide
gggcttcaggcggctgccg

SEQ ID NO: 1272 - DNA, 19 bp, Artificial Sequence
  Description of Artificial Sequence: Synthetic oligonucleotide
ggggcttcaggcggctgcc

SEQ ID NO: 1273 - DNA, 19 bp, Artificial Sequence
  Description of Artificial Sequence: Synthetic oligonucleotide
cggggcttcaggcggctgc

SEQ ID NO: 1274 - DNA, 19 bp, Artificial Sequence
  Description of Artificial Sequence: Synthetic oligonucleotide
ccggggcttcaggcggctg

SEQ ID NO: 1275 - DNA, 19 bp, Artificial Sequence
  Description of Artificial Sequence: Synthetic oligonucleotide
gccggggcttcaggcggct

SEQ ID NO: 1276 - DNA, 19 bp, Artificial Sequence
  Description of Artificial Sequence: Synthetic oligonucleotide
ggccggggcttcaggcggc

SEQ ID NO: 1277 - DNA, 19 bp, Artificial Sequence
  Description of Artificial Sequence: Synthetic oligonucleotide
aggccggggcttcaggcgg

SEQ ID NO: 1278 - DNA, 19 bp, Artificial Sequence
  Description of Artificial Sequence: Synthetic oligonucleotide
caggccggggcttcaggcg

SEQ ID NO: 1279 - DNA, 19 bp, Artificial Sequence
  Description of Artificial Sequence: Synthetic oligonucleotide
ccaggccggggcttcaggc

SEQ ID NO: 1280 - DNA, 19 bp, Artificial Sequence
  Description of Artificial Sequence: Synthetic oligonucleotide
gccaggccggggcttcagg

SEQ ID NO: 1281 - DNA, 19 bp, Artificial Sequence
  Description of Artificial Sequence: Synthetic oligonucleotide
ggccaggccggggcttcag

SEQ ID NO: 1282 - DNA, 19 bp, Artificial Sequence
  Description of Artificial Sequence: Synthetic oligonucleotide
gggccaggccggggcttca

SEQ ID NO: 1283 - DNA, 19 bp, Artificial Sequence
  Description of Artificial Sequence: Synthetic oligonucleotide
cgggccaggccggggcttc

SEQ ID NO: 1284 - DNA, 19 bp, Artificial Sequence
  Description of Artificial Sequence: Synthetic oligonucleotide
ccgggccaggccggggctt

SEQ ID NO: 1285 - DNA, 19 bp, Artificial Sequence
  Description of Artificial Sequence: Synthetic oligonucleotide
gccgggccaggccggggct

SEQ ID NO: 1286 - DNA, 19 bp, Artificial Sequence
  Description of Artificial Sequence: Synthetic oligonucleotide
ggccgggccaggccggggc

SEQ ID NO: 1287 - DNA, 19 bp, Artificial Sequence
  Description of Artificial Sequence: Synthetic oligonucleotide
cggccgggccaggccgggg

SEQ ID NO: 1288 - DNA, 19 bp, Artificial Sequence
  Description of Artificial Sequence: Synthetic oligonucleotide
gcggccgggccaggccggg

SEQ ID NO: 1289 - DNA, 19 bp, Artificial Sequence
  Description of Artificial Sequence: Synthetic oligonucleotide
tgcggccgggccaggccgg

SEQ ID NO: 1290 - DNA, 19 bp, Artificial Sequence
  Description of Artificial Sequence: Synthetic oligonucleotide
gtgcggccgggccaggccg

SEQ ID NO: 1291 - DNA, 19 bp, Artificial Sequence
  Description of Artificial Sequence: Synthetic oligonucleotide
ggtgcggccgggccaggcc

SEQ ID NO: 1292 - DNA, 19 bp, Artificial Sequence
  Description of Artificial Sequence: Synthetic oligonucleotide
gggtgcggccgggccaggc

SEQ ID NO: 1293 - DNA, 19 bp, Artificial Sequence
  Description of Artificial Sequence: Synthetic oligonucleotide
cgggtgcggccgggccagg

SEQ ID NO: 1294 - DNA, 19 bp, Artificial Sequence
  Description of Artificial Sequence: Synthetic oligonucleotide
ccgggtgcggccgggccag

SEQ ID NO: 1295 - DNA, 19 bp, Artificial Sequence
  Description of Artificial Sequence: Synthetic oligonucleotide
gccgggtgcggccgggcca

SEQ ID NO: 1296 - DNA, 19 bp, Artificial Sequence
  Description of Artificial Sequence: Synthetic oligonucleotide
ggccgggtgcggccgggcc

SEQ ID NO: 1297 - DNA, 19 bp, Artificial Sequence
  Description of Artificial Sequence: Synthetic oligonucleotide
cggccgggtgcggccgggc

SEQ ID NO: 1298 - DNA, 19 bp, Artificial Sequence
  Description of Artificial Sequence: Synthetic oligonucleotide
ccggccgggtgcggccggg

SEQ ID NO: 1299 - DNA, 19 bp, Artificial Sequence
  Description of Artificial Sequence: Synthetic oligonucleotide
tccggccgggtgcggccgg

SEQ ID NO: 1300 - DNA, 19 bp, Artificial Sequence
  Description of Artificial Sequence: Synthetic oligonucleotide
ctccggccgggtgcggccg

SEQ ID NO: 1301 - DNA, 19 bp, Artificial Sequence
  Description of Artificial Sequence: Synthetic oligonucleotide
cctccggccgggtgcggcc

SEQ ID NO: 1302 - DNA, 19 bp, Artificial Sequence
  Description of Artificial Sequence: Synthetic oligonucleotide
gcctccggccgggtgcggc

SEQ ID NO: 1303 - DNA, 19 bp, Artificial Sequence
  Description of Artificial Sequence: Synthetic oligonucleotide
cgcctccggccgggtgcgg

SEQ ID NO: 1304 - DNA, 19 bp, Artificial Sequence
  Description of Artificial Sequence: Synthetic oligonucleotide
ccgcctccggccgggtgcg

SEQ ID NO: 1305 - DNA, 19 bp, Artificial Sequence
  Description of Artificial Sequence: Synthetic oligonucleotide
tccgcctccggccgggtgc

SEQ ID NO: 1306 - DNA, 19 bp, Artificial Sequence
  Description of Artificial Sequence: Synthetic oligonucleotide
ctccgcctccggccgggtg

SEQ ID NO: 1307 - DNA, 19 bp, Artificial Sequence
  Description of Artificial Sequence: Synthetic oligonucleotide
cctccgcctccggccgggt

SEQ ID NO: 1308 - DNA, 19 bp, Artificial Sequence
  Description of Artificial Sequence: Synthetic oligonucleotide
ccctccgcctccggccggg

SEQ ID NO: 1309 - DNA, 19 bp, Artificial Sequence
  Description of Artificial Sequence: Synthetic oligonucleotide
gccctccgcctccggccgg

SEQ ID NO: 1310 - DNA, 19 bp, Artificial Sequence
  Description of Artificial Sequence: Synthetic oligonucleotide
tgccctccgcctccggccg

SEQ ID NO: 1311 - DNA, 19 bp, Artificial Sequence
  Description of Artificial Sequence: Synthetic oligonucleotide
ctgccctccgcctccggcc

SEQ ID NO: 1312 - DNA, 19 bp, Artificial Sequence
  Description of Artificial Sequence: Synthetic oligonucleotide
tctgccctccgcctccggc

SEQ ID NO: 1313 - DNA, 19 bp, Artificial Sequence
  Description of Artificial Sequence: Synthetic oligonucleotide
ctctgccctccgcctccgg

SEQ ID NO: 1314 - DNA, 19 bp, Artificial Sequence
  Description of Artificial Sequence: Synthetic oligonucleotide
gctctgccctccgcctccg

SEQ ID NO: 1315 - DNA, 19 bp, Artificial Sequence
  Description of Artificial Sequence: Synthetic oligonucleotide
cgctctgccctccgcctcc

SEQ ID NO: 1316 - DNA, 19 bp, Artificial Sequence
  Description of Artificial Sequence: Synthetic oligonucleotide
gcgctctgccctccgcctc

SEQ ID NO: 1317 - DNA, 19 bp, Artificial Sequence
  Description of Artificial Sequence: Synthetic oligonucleotide
cgcgctctgccctccgcct

SEQ ID NO: 1318 - DNA, 19 bp, Artificial Sequence
  Description of Artificial Sequence: Synthetic oligonucleotide
gcgcgctctgccctccgcc

SEQ ID NO: 1319 - DNA, 19 bp, Artificial Sequence
  Description of Artificial Sequence: Synthetic oligonucleotide
cgcgcgctctgccctccgc

SEQ ID NO: 1320 - DNA, 19 bp, Artificial Sequence
  Description of Artificial Sequence: Synthetic oligonucleotide
gcgcgcgctctgccctccg

SEQ ID NO: 1321 - DNA, 19 bp, Artificial Sequence
  Description of Artificial Sequence: Synthetic oligonucleotide
ggcgcgcgctctgccctcc

SEQ ID NO: 1322 - DNA, 19 bp, Artificial Sequence
  Description of Artificial Sequence: Synthetic oligonucleotide
gggcgcgcgctctgccctc

SEQ ID NO: 1323 - DNA, 19 bp, Artificial Sequence
  Description of Artificial Sequence: Synthetic oligonucleotide
tgggcgcgcgctctgccct

SEQ ID NO: 1324 - DNA, 19 bp, Artificial Sequence
  Description of Artificial Sequence: Synthetic oligonucleotide
ctgggcgcgcgctctgccc

SEQ ID NO: 1325 - DNA, 19 bp, Artificial Sequence
  Description of Artificial Sequence: Synthetic oligonucleotide
actgggcgcgcgctctgcc

SEQ ID NO: 1326 - DNA, 19 bp, Artificial Sequence
  Description of Artificial Sequence: Synthetic oligonucleotide
aactgggcgcgcgctctgc

SEQ ID NO: 1327 - DNA, 19 bp, Artificial Sequence
  Description of Artificial Sequence: Synthetic oligonucleotide
caactgggcgcgcgctctg

SEQ ID NO: 1328 - DNA, 19 bp, Artificial Sequence
  Description of Artificial Sequence: Synthetic oligonucleotide
gcaactgggcgcgcgctct

SEQ ID NO: 1329 - DNA, 19 bp, Artificial Sequence
  Description of Artificial Sequence: Synthetic oligonucleotide
ggcaactgggcgcgcgctc

SEQ ID NO: 1330 - DNA, 19 bp, Artificial Sequence
  Description of Artificial Sequence: Synthetic oligonucleotide
gggcaactgggcgcgcgct

SEQ ID NO: 1331 - DNA, 19 bp, Artificial Sequence
  Description of Artificial Sequence: Synthetic oligonucleotide
cgggcaactgggcgcgcgc

SEQ ID NO: 1332 - DNA, 19 bp, Artificial Sequence
  Description of Artificial Sequence: Synthetic oligonucleotide
ccgggcaactgggcgcgcg

SEQ ID NO: 1333 - DNA, 19 bp, Artificial Sequence
  Description of Artificial Sequence: Synthetic oligonucleotide
cccgggcaactgggcgcgc

SEQ ID NO: 1334 - DNA, 19 bp, Artificial Sequence
  Description of Artificial Sequence: Synthetic oligonucleotide
gcccgggcaactgggcgcg

SEQ ID NO: 1335 - DNA, 19 bp, Artificial Sequence
  Description of Artificial Sequence: Synthetic oligonucleotide
tgcccgggcaactgggcgc

SEQ ID NO: 1336 - DNA, 19 bp, Artificial Sequence
  Description of Artificial Sequence: Synthetic oligonucleotide
gtgcccgggcaactgggcg

SEQ ID NO: 1337 - DNA, 19 bp, Artificial Sequence
  Description of Artificial Sequence: Synthetic oligonucleotide
ggtgcccgggcaactgggc

SEQ ID NO: 1338 - DNA, 19 bp, Artificial Sequence
  Description of Artificial Sequence: Synthetic oligonucleotide
tggtgcccgggcaactggg

SEQ ID NO: 1339 - DNA, 19 bp, Artificial Sequence
  Description of Artificial Sequence: Synthetic oligonucleotide
ttggtgcccgggcaactgg

SEQ ID NO: 1340 - DNA, 19 bp, Artificial Sequence
  Description of Artificial Sequence: Synthetic oligonucleotide
tttggtgcccgggcaactg

SEQ ID NO: 1341 - DNA, 19 bp, Artificial Sequence
  Description of Artificial Sequence: Synthetic oligonucleotide
atttggtgcccgggcaact

SEQ ID NO: 1342 - DNA, 19 bp, Artificial Sequence
  Description of Artificial Sequence: Synthetic oligonucleotide
gatttggtgcccgggcaac

SEQ ID NO: 1343 - DNA, 19 bp, Artificial Sequence
  Description of Artificial Sequence: Synthetic oligonucleotide
cgatttggtgcccgggcaa

SEQ ID NO: 1344 - DNA, 19 bp, Artificial Sequence
  Description of Artificial Sequence: Synthetic oligonucleotide
ccgatttggtgcccgggca

SEQ ID NO: 1345 - DNA, 19 bp, Artificial Sequence
  Description of Artificial Sequence: Synthetic oligonucleotide
tccgatttggtgcccgggc

SEQ ID NO: 1346 - DNA, 19 bp, Artificial Sequence
  Description of Artificial Sequence: Synthetic oligonucleotide
ctccgatttggtgcccggg

SEQ ID NO: 1347 - DNA, 19 bp, Artificial Sequence
  Description of Artificial Sequence: Synthetic oligonucleotide
gctccgatttggtgcccgg

SEQ ID NO: 1348 - DNA, 19 bp, Artificial Sequence
  Description of Artificial Sequence: Synthetic oligonucleotide
cgctccgatttggtgcccg

SEQ ID NO: 1349 - DNA, 19 bp, Artificial Sequence
  Description of Artificial Sequence: Synthetic oligonucleotide
gcgctccgatttggtgccc

SEQ ID NO: 1350 - DNA, 19 bp, Artificial Sequence
  Description of Artificial Sequence: Synthetic oligonucleotide
cgcgctccgatttggtgcc

SEQ ID NO: 1351 - DNA, 19 bp, Artificial Sequence
  Description of Artificial Sequence: Synthetic oligonucleotide
ccgcgctccgatttggtgc

SEQ ID NO: 1352 - DNA, 19 bp, Artificial Sequence
  Description of Artificial Sequence: Synthetic oligonucleotide
gccgcgctccgatttggtg

SEQ ID NO: 1353 - DNA, 19 bp, Artificial Sequence
  Description of Artificial Sequence: Synthetic oligonucleotide
cgccgcgctccgatttggt

SEQ ID NO: 1354 - DNA, 19 bp, Artificial Sequence
  Description of Artificial Sequence: Synthetic oligonucleotide
acgccgcgctccgatttgg

SEQ ID NO: 1355 - DNA, 19 bp, Artificial Sequence
  Description of Artificial Sequence: Synthetic oligonucleotide
cacgccgcgctccgatttg

SEQ ID NO: 1356 - DNA, 19 bp, Artificial Sequence
  Description of Artificial Sequence: Synthetic oligonucleotide
gcacgccgcgctccgattt

SEQ ID NO: 1357 - DNA, 19 bp, Artificial Sequence
  Description of Artificial Sequence: Synthetic oligonucleotide
cgcacgccgcgctccgatt

SEQ ID NO: 1358 - DNA, 19 bp, Artificial Sequence
  Description of Artificial Sequence: Synthetic oligonucleotide
ccgcacgccgcgctccgat

SEQ ID NO: 1359 - DNA, 19 bp, Artificial Sequence
  Description of Artificial Sequence: Synthetic oligonucleotide
cccgcacgccgcgctccga

SEQ ID NO: 1360 - DNA, 19 bp, Artificial Sequence
  Description of Artificial Sequence: Synthetic oligonucleotide
tcccgcacgccgcgctccg

SEQ ID NO: 1361 - DNA, 19 bp, Artificial Sequence
  Description of Artificial Sequence: Synthetic oligonucleotide
ctcccgcacgccgcgctcc

SEQ ID NO: 1362 - DNA, 19 bp, Artificial Sequence
  Description of Artificial Sequence: Synthetic oligonucleotide
cctcccgcacgccgcgctc

SEQ ID NO: 1363 - DNA, 19 bp, Artificial Sequence
  Description of Artificial Sequence: Synthetic oligonucleotide
gcctcccgcacgccgcgct

SEQ ID NO: 1364 - DNA, 19 bp, Artificial Sequence
  Description of Artificial Sequence: Synthetic oligonucleotide
ggcctcccgcacgccgcgc

SEQ ID NO: 1365 - DNA, 19 bp, Artificial Sequence
  Description of Artificial Sequence: Synthetic oligonucleotide
gggcctcccgcacgccgcg

SEQ ID NO: 1366 - DNA, 19 bp, Artificial Sequence
  Description of Artificial Sequence: Synthetic oligonucleotide
ggggcctcccgcacgccgc

SEQ ID NO: 1367 - DNA, 19 bp, Artificial Sequence
  Description of Artificial Sequence: Synthetic oligonucleotide
tggggcctcccgcacgccg

SEQ ID NO: 1368 - DNA, 19 bp, Artificial Sequence
  Description of Artificial Sequence: Synthetic oligonucleotide
ctggggcctcccgcacgcc

SEQ ID NO: 1369 - DNA, 19 bp, Artificial Sequence
  Description of Artificial Sequence: Synthetic oligonucleotide
tctggggcctcccgcacgc

SEQ ID NO: 1370 - DNA, 19 bp, Artificial Sequence
  Description of Artificial Sequence: Synthetic oligonucleotide
ctctggggcctcccgcacg

SEQ ID NO: 1371 - DNA, 19 bp, Artificial Sequence
  Description of Artificial Sequence: Synthetic oligonucleotide
gctctggggcctcccgcac

SEQ ID NO: 1372 - DNA, 19 bp, Artificial Sequence
  Description of Artificial Sequence: Synthetic oligonucleotide
tgctctggggcctcccgca

SEQ ID NO: 1373 - DNA, 19 bp, Artificial Sequence
  Description of Artificial Sequence: Synthetic oligonucleotide
ctgctctggggcctcccgc

SEQ ID NO: 1374 - DNA, 19 bp, Artificial Sequence
  Description of Artificial Sequence: Synthetic oligonucleotide
cctgctctggggcctcccg

SEQ ID NO: 1375 - DNA, 19 bp, Artificial Sequence
  Description of Artificial Sequence: Synthetic oligonucleotide
tcctgctctggggcctccc

SEQ ID NO: 1376 - DNA, 19 bp, Artificial Sequence
  Description of Artificial Sequence: Synthetic oligonucleotide
gtcctgctctggggcctcc

SEQ ID NO: 1377 - DNA, 19 bp, Artificial Sequence
  Description of Artificial Sequence: Synthetic oligonucleotide
agtcctgctctggggcctc

SEQ ID NO: 1378 - DNA, 19 bp, Artificial Sequence
  Description of Artificial Sequence: Synthetic oligonucleotide
cagtcctgctctggggcct

SEQ ID NO: 1379 - DNA, 19 bp, Artificial Sequence
  Description of Artificial Sequence: Synthetic oligonucleotide
ccagtcctgctctggggcc

SEQ ID NO: 1380 - DNA, 19 bp, Artificial Sequence
  Description of Artificial Sequence: Synthetic oligonucleotide
tccagtcctgctctggggc

SEQ ID NO: 1381 - DNA, 19 bp, Artificial Sequence
  Description of Artificial Sequence: Synthetic oligonucleotide
ttccagtcctgctctgggg

SEQ ID NO: 1382 - DNA, 19 bp, Artificial Sequence
  Description of Artificial Sequence: Synthetic oligonucleotide
tttccagtcctgctctggg

SEQ ID NO: 1383 - DNA, 19 bp, Artificial Sequence
  Description of Artificial Sequence: Synthetic oligonucleotide
atttccagtcctgctctgg

SEQ ID NO: 1384 - DNA, 19 bp, Artificial Sequence
  Description of Artificial Sequence: Synthetic oligonucleotide
catttccagtcctgctctg

SEQ ID NO: 1385 - DNA, 19 bp, Artificial Sequence
  Description of Artificial Sequence: Synthetic oligonucleotide
acatttccagtcctgctct

SEQ ID NO: 1386 - DNA, 19 bp, Artificial Sequence
  Description of Artificial Sequence: Synthetic oligonucleotide
gacatttccagtcctgctc

SEQ ID NO: 1387 - DNA, 19 bp, Artificial Sequence
  Description of Artificial Sequence: Synthetic oligonucleotide
ggacatttccagtcctgct

SEQ ID NO: 1388 - DNA, 19 bp, Artificial Sequence
  Description of Artificial Sequence: Synthetic oligonucleotide
aggacatttccagtcctgc

SEQ ID NO: 1389 - DNA, 19 bp, Artificial Sequence
  Description of Artificial Sequence: Synthetic oligonucleotide
caggacatttccagtcctg

SEQ ID NO: 1390 - DNA, 19 bp, Artificial Sequence
  Description of Artificial Sequence: Synthetic oligonucleotide
ccaggacatttccagtcct

SEQ ID NO: 1391 - DNA, 19 bp, Artificial Sequence
  Description of Artificial Sequence: Synthetic oligonucleotide
gccaggacatttccagtcc

SEQ ID NO: 1392 - DNA, 19 bp, Artificial Sequence
  Description of Artificial Sequence: Synthetic oligonucleotide
ggccaggacatttccagtc

SEQ ID NO: 1393 - DNA, 19 bp, Artificial Sequence
  Description of Artificial Sequence: Synthetic oligonucleotide
cggccaggacatttccagt

SEQ ID NO: 1394 - DNA, 19 bp, Artificial Sequence
  Description of Artificial Sequence: Synthetic oligonucleotide
gcggccaggacatttccag

SEQ ID NO: 1395 - DNA, 19 bp, Artificial Sequence
  Description of Artificial Sequence: Synthetic oligonucleotide
cgcggccaggacatttcca

SEQ ID NO: 1396 - DNA, 19 bp, Artificial Sequence
  Description of Artificial Sequence: Synthetic oligonucleotide
gcgcggccaggacatttcc

SEQ ID NO: 1397 - DNA, 19 bp, Artificial Sequence
  Description of Artificial Sequence: Synthetic oligonucleotide
ggcgcggccaggacatttc

SEQ ID NO: 1398 - DNA, 19 bp, Artificial Sequence
  Description of Artificial Sequence: Synthetic oligonucleotide
cggcgcggccaggacattt

SEQ ID NO: 1399 - DNA, 19 bp, Artificial Sequence
  Description of Artificial Sequence: Synthetic oligonucleotide
gcggcgcggccaggacatt

SEQ ID NO: 1400 - DNA, 19 bp, Artificial Sequence
  Description of Artificial Sequence: Synthetic oligonucleotide
ggcggcgcggccaggacat

SEQ ID NO: 1401 - DNA, 19 bp, Artificial Sequence
  Description of Artificial Sequence: Synthetic oligonucleotide
aggcggcgcggccaggaca

SEQ ID NO: 1402 - DNA, 19 bp, Artificial Sequence
  Description of Artificial Sequence: Synthetic oligonucleotide
gaggcggcgcggccaggac

SEQ ID NO: 1403 - DNA, 19 bp, Artificial Sequence
  Description of Artificial Sequence: Synthetic oligonucleotide
ggaggcggcgcggccagga

SEQ ID NO: 1404 - DNA, 19 bp, Artificial Sequence
  Description of Artificial Sequence: Synthetic oligonucleotide
aggaggcggcgcggccagg

SEQ ID NO: 1405 - DNA, 19 bp, Artificial Sequence
  Description of Artificial Sequence: Synthetic oligonucleotide
caggaggcggcgcggccag

SEQ ID NO: 1406 - DNA, 19 bp, Artificial Sequence
  Description of Artificial Sequence: Synthetic oligonucleotide
gcaggaggcggcgcggcca

SEQ ID NO: 1407 - DNA, 19 bp, Artificial Sequence
  Description of Artificial Sequence: Synthetic oligonucleotide
agcaggaggcggcgcggcc

SEQ ID NO: 1408 - DNA, 19 bp, Artificial Sequence
  Description of Artificial Sequence: Synthetic oligonucleotide
gagcaggaggcggcgcggc

SEQ ID NO: 1409 - DNA, 19 bp, Artificial Sequence
  Description of Artificial Sequence: Synthetic oligonucleotide
tgagcaggaggcggcgcgg

SEQ ID NO: 1410 - DNA, 19 bp, Artificial Sequence
  Description of Artificial Sequence: Synthetic oligonucleotide
ctgagcaggaggcggcgcg

SEQ ID NO: 1411 - DNA, 19 bp, Artificial Sequence
  Description of Artificial Sequence: Synthetic oligonucleotide
tctgagcaggaggcggcgc

SEQ ID NO: 1412 - DNA, 19 bp, Artificial Sequence
  Description of Artificial Sequence: Synthetic oligonucleotide
atctgagcaggaggcggcg

SEQ ID NO: 1413 - DNA, 19 bp, Artificial Sequence
  Description of Artificial Sequence: Synthetic oligonucleotide
tatctgagcaggaggcggc

SEQ ID NO: 1414 - DNA, 19 bp, Artificial Sequence
  Description of Artificial Sequence: Synthetic oligonucleotide
gtatctgagcaggaggcgg

SEQ ID NO: 1415 - DNA, 19 bp, Artificial Sequence
  Description of Artificial Sequence: Synthetic oligonucleotide
ggtatctgagcaggaggcg

SEQ ID NO: 1416 - DNA, 19 bp, Artificial Sequence
  Description of Artificial Sequence: Synthetic oligonucleotide
aggtatctgagcaggaggc

SEQ ID NO: 1417 - DNA, 19 bp, Artificial Sequence
  Description of Artificial Sequence: Synthetic oligonucleotide
caggtatctgagcaggagg

SEQ ID NO: 1418 - DNA, 19 bp, Artificial Sequence
  Description of Artificial Sequence: Synthetic oligonucleotide
acaggtatctgagcaggag

SEQ ID NO: 1419 - DNA, 19 bp, Artificial Sequence
  Description of Artificial Sequence: Synthetic oligonucleotide
aacaggtatctgagcagga

SEQ ID NO: 1420 - DNA, 19 bp, Artificial Sequence
  Description of Artificial Sequence: Synthetic oligonucleotide
gaacaggtatctgagcagg

SEQ ID NO: 1421 - DNA, 19 bp, Artificial Sequence
  Description of Artificial Sequence: Synthetic oligonucleotide
ggaacaggtatctgagcag

SEQ ID NO: 1422 - DNA, 19 bp, Artificial Sequence
  Description of Artificial Sequence: Synthetic oligonucleotide
gggaacaggtatctgagca

SEQ ID NO: 1423 - DNA, 19 bp, Artificial Sequence
  Description of Artificial Sequence: Synthetic oligonucleotide
cgggaacaggtatctgagc

SEQ ID NO: 1424 - DNA, 19 bp, Artificial Sequence
  Description of Artificial Sequence: Synthetic oligonucleotide
ccgggaacaggtatctgag

SEQ ID NO: 1425 - DNA, 19 bp, Artificial Sequence
  Description of Artificial Sequence: Synthetic oligonucleotide
gccgggaacaggtatctga

SEQ ID NO: 1426 - DNA, 19 bp, Artificial Sequence
  Description of Artificial Sequence: Synthetic oligonucleotide
ggccgggaacaggtatctg

SEQ ID NO: 1427 - DNA, 19 bp, Artificial Sequence
  Description of Artificial Sequence: Synthetic oligonucleotide
gggccgggaacaggtatct

SEQ ID NO: 1428 - DNA, 19 bp, Artificial Sequence
  Description of Artificial Sequence: Synthetic oligonucleotide
agggccgggaacaggtatc

SEQ ID NO: 1429 - DNA, 19 bp, Artificial Sequence
  Description of Artificial Sequence: Synthetic oligonucleotide
gagggccgggaacaggtat

SEQ ID NO: 1430 - DNA, 19 bp, Artificial Sequence
  Description of Artificial Sequence: Synthetic oligonucleotide
ggagggccgggaacaggta

SEQ ID NO: 1431 - DNA, 19 bp, Artificial Sequence
  Description of Artificial Sequence: Synthetic oligonucleotide
aggagggccgggaacaggt

SEQ ID NO: 1432 - DNA, 19 bp, Artificial Sequence
  Description of Artificial Sequence: Synthetic oligonucleotide
caggagggccgggaacagg

SEQ ID NO: 1433 - DNA, 19 bp, Artificial Sequence
  Description of Artificial Sequence: Synthetic oligonucleotide
gcaggagggccgggaacag

SEQ ID NO: 1434 - DNA, 19 bp, Artificial Sequence
  Description of Artificial Sequence: Synthetic oligonucleotide
agcaggagggccgggaaca

SEQ ID NO: 1435 - DNA, 19 bp, Artificial Sequence
  Description of Artificial Sequence: Synthetic oligonucleotide
aagcaggagggccgggaac

SEQ ID NO: 1436 - DNA, 19 bp, Artificial Sequence
  Description of Artificial Sequence: Synthetic oligonucleotide
gaagcaggagggccgggaa

SEQ ID NO: 1437 - DNA, 19 bp, Artificial Sequence
  Description of Artificial Sequence: Synthetic oligonucleotide
tgaagcaggagggccggga

SEQ ID NO: 1438 - DNA, 19 bp, Artificial Sequence
  Description of Artificial Sequence: Synthetic oligonucleotide
gtgaagcaggagggccggg

SEQ ID NO: 1439 - DNA, 19 bp, Artificial Sequence
  Description of Artificial Sequence: Synthetic oligonucleotide
cgtgaagcaggagggccgg

SEQ ID NO: 1440 - DNA, 19 bp, Artificial Sequence
  Description of Artificial Sequence: Synthetic oligonucleotide
ccgtgaagcaggagggccg

SEQ ID NO: 1441 - DNA, 19 bp, Artificial Sequence
  Description of Artificial Sequence: Synthetic oligonucleotide
cccgtgaagcaggagggcc

SEQ ID NO: 1442 - DNA, 19 bp, Artificial Sequence
  Description of Artificial Sequence: Synthetic oligonucleotide
gcccgtgaagcaggagggc

SEQ ID NO: 1443 - DNA, 19 bp, Artificial Sequence
  Description of Artificial Sequence: Synthetic oligonucleotide
agcccgtgaagcaggaggg

SEQ ID NO: 1444 - DNA, 19 bp, Artificial Sequence
  Description of Artificial Sequence: Synthetic oligonucleotide
cagcccgtgaagcaggagg

SEQ ID NO: 1445 - DNA, 19 bp, Artificial Sequence
  Description of Artificial Sequence: Synthetic oligonucleotide
ccagcccgtgaagcaggag

SEQ ID NO: 1446 - DNA, 19 bp, Artificial Sequence
  Description of Artificial Sequence: Synthetic oligonucleotide
cccagcccgtgaagcagga

SEQ ID NO: 1447 - DNA, 19 bp, Artificial Sequence
  Description of Artificial Sequence: Synthetic oligonucleotide
tcccagcccgtgaagcagg

SEQ ID NO: 1448 - DNA, 19 bp, Artificial Sequence
  Description of Artificial Sequence: Synthetic oligonucleotide
ctcccagcccgtgaagcag

SEQ ID NO: 1449 - DNA, 19 bp, Artificial Sequence
  Description of Artificial Sequence: Synthetic oligonucleotide
tctcccagcccgtgaagca

SEQ ID NO: 1450 - DNA, 19 bp, Artificial Sequence
  Description of Artificial Sequence: Synthetic oligonucleotide
ctctcccagcccgtgaagc

SEQ ID NO: 1451 - DNA, 19 bp, Artificial Sequence
  Description of Artificial Sequence: Synthetic oligonucleotide
cctctcccagcccgtgaag

SEQ ID NO: 1452 - DNA, 19 bp, Artificial Sequence
  Description of Artificial Sequence: Synthetic oligonucleotide
ccctctcccagcccgtgaa

SEQ ID NO: 1453 - DNA, 19 bp, Artificial Sequence
  Description of Artificial Sequence: Synthetic oligonucleotide
accctctcccagcccgtga

SEQ ID NO: 1454 - DNA, 19 bp, Artificial Sequence
  Description of Artificial Sequence: Synthetic oligonucleotide
aaccctctcccagcccgtg

SEQ ID NO: 1455 - DNA, 19 bp, Artificial Sequence
  Description of Artificial Sequence: Synthetic oligonucleotide
gaaccctctcccagcccgt

SEQ ID NO: 1456 - DNA, 19 bp, Artificial Sequence
  Description of Artificial Sequence: Synthetic oligonucleotide
agaaccctctcccagcccg

SEQ ID NO: 1457 - DNA, 19 bp, Artificial Sequence
  Description of Artificial Sequence: Synthetic oligonucleotide
cagaaccctctcccagccc

SEQ ID NO: 1458 - DNA, 19 bp, Artificial Sequence
  Description of Artificial Sequence: Synthetic oligonucleotide
gcagaaccctctcccagcc

SEQ ID NO: 1459 - DNA, 19 bp, Artificial Sequence
  Description of Artificial Sequence: Synthetic oligonucleotide
ggcagaaccctctcccagc

SEQ ID NO: 1460 - DNA, 19 bp, Artificial Sequence
  Description of Artificial Sequence: Synthetic oligonucleotide
gggcagaaccctctcccag

SEQ ID NO: 1461 - DNA, 19 bp, Artificial Sequence
  Description of Artificial Sequence: Synthetic oligonucleotide
agggcagaaccctctccca

SEQ ID NO: 1462 - DNA, 19 bp, Artificial Sequence
  Description of Artificial Sequence: Synthetic oligonucleotide
gagggcagaaccctctccc

SEQ ID NO: 1463 - DNA, 19 bp, Artificial Sequence
  Description of Artificial Sequence: Synthetic oligonucleotide
ggagggcagaaccctctcc

SEQ ID NO: 1464 - DNA, 19 bp, Artificial Sequence
  Description of Artificial Sequence: Synthetic oligonucleotide
aggagggcagaaccctctc

SEQ ID NO: 1465 - DNA, 19 bp, Artificial Sequence
  Description of Artificial Sequence: Synthetic oligonucleotide
aaggagggcagaaccctct

SEQ ID NO: 1466 - DNA, 19 bp, Artificial Sequence
  Description of Artificial Sequence: Synthetic oligonucleotide
gaaggagggcagaaccctc

SEQ ID NO: 1467 - DNA, 19 bp, Artificial Sequence
  Description of Artificial Sequence: Synthetic oligonucleotide
tgaaggagggcagaaccct

SEQ ID NO: 1468 - DNA, 19 bp, Artificial Sequence
  Description of Artificial Sequence: Synthetic oligonucleotide
atgaaggagggcagaaccc

SEQ ID NO: 1469 - DNA, 19 bp, Artificial Sequence
  Description of Artificial Sequence: Synthetic oligonucleotide
gatgaaggagggcagaacc

SEQ ID NO: 1470 - DNA, 19 bp, Artificial Sequence
  Description of Artificial Sequence: Synthetic oligonucleotide
ggatgaaggagggcagaac

SEQ ID NO: 1471 - DNA, 19 bp, Artificial Sequence
  Description of Artificial Sequence: Synthetic oligonucleotide
tggatgaaggagggcagaa

SEQ ID NO: 1472 - DNA, 19 bp, Artificial Sequence
  Description of Artificial Sequence: Synthetic oligonucleotide
ctggatgaaggagggcaga

SEQ ID NO: 1473 - DNA, 19 bp, Artificial Sequence
  Description of Artificial Sequence: Synthetic oligonucleotide
tctggatgaaggagggcag

SEQ ID NO: 1474 - DNA, 19 bp, Artificial Sequence
  Description of Artificial Sequence: Synthetic oligonucleotide
gtctggatgaaggagggca

SEQ ID NO: 1475 - DNA, 19 bp, Artificial Sequence
  Description of Artificial Sequence: Synthetic oligonucleotide
tgtctggatgaaggagggc

SEQ ID NO: 1476 - DNA, 19 bp, Artificial Sequence
  Description of Artificial Sequence: Synthetic oligonucleotide
ctgtctggatgaaggaggg

SEQ ID NO: 1477 - DNA, 19 bp, Artificial Sequence
  Description of Artificial Sequence: Synthetic oligonucleotide
gctgtctggatgaaggagg

SEQ ID NO: 1478 - DNA, 19 bp, Artificial Sequence
  Description of Artificial Sequence: Synthetic oligonucleotide
tgctgtctggatgaaggag

SEQ ID NO: 1479 - DNA, 19 bp, Artificial Sequence
  Description of Artificial Sequence: Synthetic oligonucleotide
ctgctgtctggatgaagga

SEQ ID NO: 1480 - DNA, 19 bp, Artificial Sequence
  Description of Artificial Sequence: Synthetic oligonucleotide
cctgctgtctggatgaagg

SEQ ID NO: 1481 - DNA, 19 bp, Artificial Sequence
  Description of Artificial Sequence: Synthetic oligonucleotide
acctgctgtctggatgaag

SEQ ID NO: 1482 - DNA, 19 bp, Artificial Sequence
  Description of Artificial Sequence: Synthetic oligonucleotide
gacctgctgtctggatgaa

SEQ ID NO: 1483 - DNA, 19 bp, Artificial Sequence
  Description of Artificial Sequence: Synthetic oligonucleotide
agacctgctgtctggatga

SEQ ID NO: 1484 - DNA, 19 bp, Artificial Sequence
  Description of Artificial Sequence: Synthetic oligonucleotide
gagacctgctgtctggatg

SEQ ID NO: 1485 - DNA, 19 bp, Artificial Sequence
  Description of Artificial Sequence: Synthetic oligonucleotide
tgagacctgctgtctggat

SEQ ID NO: 1486 - DNA, 19 bp, Artificial Sequence
  Description of Artificial Sequence: Synthetic oligonucleotide
atgagacctgctgtctgga

SEQ ID NO: 1487 - DNA, 19 bp, Artificial Sequence
  Description of Artificial Sequence: Synthetic oligonucleotide
gatgagacctgctgtctgg

SEQ ID NO: 1488 - DNA, 19 bp, Artificial Sequence
  Description of Artificial Sequence: Synthetic oligonucleotide
ggatgagacctgctgtctg

SEQ ID NO: 1489 - DNA, 19 bp, Artificial Sequence
  Description of Artificial Sequence: Synthetic oligonucleotide
aggatgagacctgctgtct

SEQ ID NO: 1490 - DNA, 19 bp, Artificial Sequence
  Description of Artificial Sequence: Synthetic oligonucleotide
taggatgagacctgctgtc

SEQ ID NO: 1491 - DNA, 19 bp, Artificial Sequence
  Description of Artificial Sequence: Synthetic oligonucleotide
ctaggatgagacctgctgt

SEQ ID NO: 1492 - DNA, 19 bp, Artificial Sequence
  Description of Artificial Sequence: Synthetic oligonucleotide
cctaggatgagacctgctg

SEQ ID NO: 1493 - DNA, 19 bp, Artificial Sequence
  Description of Artificial Sequence: Synthetic oligonucleotide
acctaggatgagacctgct

SEQ ID NO: 1494 - DNA, 19 bp, Artificial Sequence
  Description of Artificial Sequence: Synthetic oligonucleotide
gacctaggatgagacctgc

SEQ ID NO: 1495 - DNA, 19 bp, Artificial Sequence
  Description of Artificial Sequence: Synthetic oligonucleotide
ggacctaggatgagacctg

SEQ ID NO: 1496 - DNA, 19 bp, Artificial Sequence
  Description of Artificial Sequence: Synthetic oligonucleotide
aggacctaggatgagacct

SEQ ID NO: 1497 - DNA, 19 bp, Artificial Sequence
  Description of Artificial Sequence: Synthetic oligonucleotide
aaggacctaggatgagacc

SEQ ID NO: 1498 - DNA, 19 bp, Artificial Sequence
  Description of Artificial Sequence: Synthetic oligonucleotide
taaggacctaggatgagac

SEQ ID NO: 1499 - DNA, 19 bp, Artificial Sequence
  Description of Artificial Sequence: Synthetic oligonucleotide
ctaaggacctaggatgaga

SEQ ID NO: 1500 - DNA, 19 bp, Artificial Sequence
  Description of Artificial Sequence: Synthetic oligonucleotide
tctaaggacctaggatgag

SEQ ID NO: 1501 - DNA, 19 bp, Artificial Sequence
  Description of Artificial Sequence: Synthetic oligonucleotide
ctctaaggacctaggatga

SEQ ID NO: 1502 - DNA, 19 bp, Artificial Sequence
  Description of Artificial Sequence: Synthetic oligonucleotide
tctctaaggacctaggatg

SEQ ID NO: 1503 - DNA, 19 bp, Artificial Sequence
  Description of Artificial Sequence: Synthetic oligonucleotide
ttctctaaggacctaggat

SEQ ID NO: 1504 - DNA, 19 bp, Artificial Sequence
  Description of Artificial Sequence: Synthetic oligonucleotide
tttctctaaggacctagga

SEQ ID NO: 1505 - DNA, 19 bp, Artificial Sequence
  Description of Artificial Sequence: Synthetic oligonucleotide
ttttctctaaggacctagg

SEQ ID NO: 1506 - DNA, 19 bp, Artificial Sequence
  Description of Artificial Sequence: Synthetic oligonucleotide
cttttctctaaggacctag

SEQ ID NO: 1507 - DNA, 19 bp, Artificial Sequence
  Description of Artificial Sequence: Synthetic oligonucleotide
acttttctctaaggaccta

SEQ ID NO: 1508 - DNA, 19 bp, Artificial Sequence
  Description of Artificial Sequence: Synthetic oligonucleotide
cacttttctctaaggacct

SEQ ID NO: 1509 - DNA, 19 bp, Artificial Sequence
  Description of Artificial Sequence: Synthetic oligonucleotide
gcacttttctctaaggacc

SEQ ID NO: 1510 - DNA, 19 bp, Artificial Sequence
  Description of Artificial Sequence: Synthetic oligonucleotide
ggcacttttctctaaggac

SEQ ID NO: 1511 - DNA, 19 bp, Artificial Sequence
  Description of Artificial Sequence: Synthetic oligonucleotide
aggcacttttctctaagga

SEQ ID NO: 1512 - DNA, 19 bp, Artificial Sequence
  Description of Artificial Sequence: Synthetic oligonucleotide
caggcacttttctctaagg

SEQ ID NO: 1513 - DNA, 19 bp, Artificial Sequence
  Description of Artificial Sequence: Synthetic oligonucleotide
ccaggcacttttctctaag

SEQ ID NO: 1514 - DNA, 19 bp, Artificial Sequence
  Description of Artificial Sequence: Synthetic oligonucleotide
tccaggcacttttctctaa

SEQ ID NO: 1515 - DNA, 19 bp, Artificial Sequence
  Description of Artificial Sequence: Synthetic oligonucleotide
ctccaggcacttttctcta

SEQ ID NO: 1516 - DNA, 19 bp, Artificial Sequence
  Description of Artificial Sequence: Synthetic oligonucleotide
cctccaggcacttttctct

SEQ ID NO: 1517 - DNA, 19 bp, Artificial Sequence
  Description of Artificial Sequence: Synthetic oligonucleotide
ccctccaggcacttttctc

SEQ ID NO: 1518 - DNA, 19 bp, Artificial Sequence
  Description of Artificial Sequence: Synthetic oligonucleotide
gccctccaggcacttttct

SEQ ID NO: 1519 - DNA, 19 bp, Artificial Sequence
  Description of Artificial Sequence: Synthetic oligonucleotide
agccctccaggcacttttc

SEQ ID NO: 1520 - DNA, 19 bp, Artificial Sequence
  Description of Artificial Sequence: Synthetic oligonucleotide
aagccctccaggcactttt

SEQ ID NO: 1521 - DNA, 19 bp, Artificial Sequence
  Description of Artificial Sequence: Synthetic oligonucleotide
aaagccctccaggcacttt

SEQ ID NO: 1522 - DNA, 19 bp, Artificial Sequence
  Description of Artificial Sequence: Synthetic oligonucleotide
aaaagccctccaggcactt

SEQ ID NO: 1523 - DNA, 19 bp, Artificial Sequence
  Description of Artificial Sequence: Synthetic oligonucleotide
taaaagccctccaggcact

SEQ ID NO: 1524 - DNA, 19 bp, Artificial Sequence
  Description of Artificial Sequence: Synthetic oligonucleotide
ttaaaagccctccaggcac

SEQ ID NO: 1525 - DNA, 19 bp, Artificial Sequence
  Description of Artificial Sequence: Synthetic oligonucleotide
cttaaaagccctccaggca

SEQ ID NO: 1526 - DNA, 19 bp, Artificial Sequence
  Description of Artificial Sequence: Synthetic oligonucleotide
ccttaaaagccctccaggc

SEQ ID NO: 1527 - DNA, 19 bp, Artificial Sequence
  Description of Artificial Sequence: Synthetic oligonucleotide
tccttaaaagccctccagg

SEQ ID NO: 1528 - DNA, 19 bp, Artificial Sequence
  Description of Artificial Sequence: Synthetic oligonucleotide
ctccttaaaagccctccag

SEQ ID NO: 1529 - DNA, 19 bp, Artificial Sequence
  Description of Artificial Sequence: Synthetic oligonucleotide
actccttaaaagccctcca

SEQ ID NO: 1530 - DNA, 19 bp, Artificial Sequence
  Description of Artificial Sequence: Synthetic oligonucleotide
gactccttaaaagccctcc

SEQ ID NO: 1531 - DNA, 19 bp, Artificial Sequence
  Description of Artificial Sequence: Synthetic oligonucleotide
tgactccttaaaagccctc

SEQ ID NO: 1532 - DNA, 19 bp, Artificial Sequence
  Description of Artificial Sequence: Synthetic oligonucleotide
gtgactccttaaaagccct

SEQ ID NO: 1533 - DNA, 19 bp, Artificial Sequence
  Description of Artificial Sequence: Synthetic oligonucleotide
tgtgactccttaaaagccc

SEQ ID NO: 1534 - DNA, 19 bp, Artificial Sequence
  Description of Artificial Sequence: Synthetic oligonucleotide
ctgtgactccttaaaagcc

SEQ ID NO: 1535 - DNA, 19 bp, Artificial Sequence
  Description of Artificial Sequence: Synthetic oligonucleotide
actgtgactccttaaaagc

SEQ ID NO: 1536 - DNA, 19 bp, Artificial Sequence
  Description of Artificial Sequence: Synthetic oligonucleotide
cactgtgactccttaaaag

SEQ ID NO: 1537 - DNA, 19 bp, Artificial Sequence
  Description of Artificial Sequence: Synthetic oligonucleotide
gcactgtgactccttaaaa

SEQ ID NO: 1538 - DNA, 19 bp, Artificial Sequence
  Description of Artificial Sequence: Synthetic oligonucleotide
ggcactgtgactccttaaa

SEQ ID NO: 1539 - DNA, 19 bp, Artificial Sequence
  Description of Artificial Sequence: Synthetic oligonucleotide
tggcactgtgactccttaa

SEQ ID NO: 1540 - DNA, 19 bp, Artificial Sequence
  Description of Artificial Sequence: Synthetic oligonucleotide
atggcactgtgactcctta

SEQ ID NO: 1541 - DNA, 19 bp, Artificial Sequence
  Description of Artificial Sequence: Synthetic oligonucleotide
gatggcactgtgactcctt

SEQ ID NO: 1542 - DNA, 19 bp, Artificial Sequence
  Description of Artificial Sequence: Synthetic oligonucleotide
tgatggcactgtgactcct

SEQ ID NO: 1543 - DNA, 19 bp, Artificial Sequence
  Description of Artificial Sequence: Synthetic oligonucleotide
gtgatggcactgtgactcc

SEQ ID NO: 1544 - DNA, 19 bp, Artificial Sequence
  Description of Artificial Sequence: Synthetic oligonucleotide
tgtgatggcactgtgactc

SEQ ID NO: 1545 - DNA, 19 bp, Artificial Sequence
  Description of Artificial Sequence: Synthetic oligonucleotide
atgtgatggcactgtgact

SEQ ID NO: 1546 - DNA, 19 bp, Artificial Sequence
  Description of Artificial Sequence: Synthetic oligonucleotide
catgtgatggcactgtgac

SEQ ID NO: 1547 - DNA, 19 bp, Artificial Sequence
  Description of Artificial Sequence: Synthetic oligonucleotide
gcatgtgatggcactgtga

SEQ ID NO: 1548 - DNA, 19 bp, Artificial Sequence
  Description of Artificial Sequence: Synthetic oligonucleotide
agcatgtgatggcactgtg

SEQ ID NO: 1549 - DNA, 19 bp, Artificial Sequence
  Description of Artificial Sequence: Synthetic oligonucleotide
gagcatgtgatggcactgt

SEQ ID NO: 1550 - DNA, 19 bp, Artificial Sequence
  Description of Artificial Sequence: Synthetic oligonucleotide
tgagcatgtgatggcactg

SEQ ID NO: 1551 - DNA, 19 bp, Artificial Sequence
  Description of Artificial Sequence: Synthetic oligonucleotide
ttgagcatgtgatggcact

SEQ ID NO: 1552 - DNA, 19 bp, Artificial Sequence
  Description of Artificial Sequence: Synthetic oligonucleotide
tttgagcatgtgatggcac

SEQ ID NO: 1553 - DNA, 19 bp, Artificial Sequence
  Description of Artificial Sequence: Synthetic oligonucleotide
gtttgagcatgtgatggca

SEQ ID NO: 1554 - DNA, 19 bp, Artificial Sequence
  Description of Artificial Sequence: Synthetic oligonucleotide
tgtttgagcatgtgatggc

SEQ ID NO: 1555 - DNA, 19 bp, Artificial Sequence
  Description of Artificial Sequence: Synthetic oligonucleotide
atgtttgagcatgtgatgg

SEQ ID NO: 1556 - DNA, 19 bp, Artificial Sequence
  Description of Artificial Sequence: Synthetic oligonucleotide
gatgtttgagcatgtgatg

SEQ ID NO: 1557 - DNA, 19 bp, Artificial Sequence
  Description of Artificial Sequence: Synthetic oligonucleotide
agatgtttgagcatgtgat

SEQ ID NO: 1558 - DNA, 19 bp, Artificial Sequence
  Description of Artificial Sequence: Synthetic oligonucleotide
gagatgtttgagcatgtga

SEQ ID NO: 1559 - DNA, 19 bp, Artificial Sequence
  Description of Artificial Sequence: Synthetic oligonucleotide
ggagatgtttgagcatgtg

SEQ ID NO: 1560 - DNA, 19 bp, Artificial Sequence
  Description of Artificial Sequence: Synthetic oligonucleotide
tggagatgtttgagcatgt

SEQ ID NO: 1561 - DNA, 19 bp, Artificial Sequence
  Description of Artificial Sequence: Synthetic oligonucleotide
gtggagatgtttgagcatg

SEQ ID NO: 1562 - DNA, 19 bp, Artificial Sequence
  Description of Artificial Sequence: Synthetic oligonucleotide
tgtggagatgtttgagcat

SEQ ID NO: 1563 - DNA, 19 bp, Artificial Sequence
  Description of Artificial Sequence: Synthetic oligonucleotide
ttgtggagatgtttgagca

SEQ ID NO: 1564 - DNA, 19 bp, Artificial Sequence
  Description of Artificial Sequence: Synthetic oligonucleotide
attgtggagatgtttgagc

SEQ ID NO: 1565 - DNA, 19 bp, Artificial Sequence
  Description of Artificial Sequence: Synthetic oligonucleotide
cattgtggagatgtttgag

SEQ ID NO: 1566 - DNA, 19 bp, Artificial Sequence
  Description of Artificial Sequence: Synthetic oligonucleotide
ccattgtggagatgtttga

SEQ ID NO: 1567 - DNA, 19 bp, Artificial Sequence
  Description of Artificial Sequence: Synthetic oligonucleotide
accattgtggagatgtttg

SEQ ID NO: 1568 - DNA, 19 bp, Artificial Sequence
  Description of Artificial Sequence: Synthetic oligonucleotide
caccattgtggagatgttt

SEQ ID NO: 1569 - DNA, 19 bp, Artificial Sequence
  Description of Artificial Sequence: Synthetic oligonucleotide
gcaccattgtggagatgtt

SEQ ID NO: 1570 - DNA, 19 bp, Artificial Sequence
  Description of Artificial Sequence: Synthetic oligonucleotide
tgcaccattgtggagatgt

SEQ ID NO: 1571 - DNA, 19 bp, Artificial Sequence
  Description of Artificial Sequence: Synthetic oligonucleotide
ttgcaccattgtggagatg

SEQ ID NO: 1572 - DNA, 19 bp, Artificial Sequence
  Description of Artificial Sequence: Synthetic oligonucleotide
cttgcaccattgtggagat

SEQ ID NO: 1573 - DNA, 19 bp, Artificial Sequence
  Description of Artificial Sequence: Synthetic oligonucleotide
ccttgcaccattgtggaga

SEQ ID NO: 1574 - DNA, 19 bp, Artificial Sequence
  Description of Artificial Sequence: Synthetic oligonucleotide
tccttgcaccattgtggag

SEQ ID NO: 1575 - DNA, 19 bp, Artificial Sequence
  Description of Artificial Sequence: Synthetic oligonucleotide
atccttgcaccattgtgga

SEQ ID NO: 1576 - DNA, 19 bp, Artificial Sequence
  Description of Artificial Sequence: Synthetic oligonucleotide
gatccttgcaccattgtgg

SEQ ID NO: 1577 - DNA, 19 bp, Artificial Sequence
  Description of Artificial Sequence: Synthetic oligonucleotide
tgatccttgcaccattgtg

SEQ ID NO: 1578 - DNA, 19 bp, Artificial Sequence
  Description of Artificial Sequence: Synthetic oligonucleotide
gtgatccttgcaccattgt

SEQ ID NO: 1579 - DNA, 19 bp, Artificial Sequence
  Description of Artificial Sequence: Synthetic oligonucleotide
tgtgatccttgcaccattg

SEQ ID NO: 1580 - DNA, 19 bp, Artificial Sequence
  Description of Artificial Sequence: Synthetic oligonucleotide
ctgtgatccttgcaccatt

SEQ ID NO: 1581 - DNA, 19 bp, Artificial Sequence
  Description of Artificial Sequence: Synthetic oligonucleotide
actgtgatccttgcaccat

SEQ ID NO: 1582 - DNA, 19 bp, Artificial Sequence
  Description of Artificial Sequence: Synthetic oligonucleotide
cactgtgatccttgcacca

SEQ ID NO: 1583 - DNA, 19 bp, Artificial Sequence
  Description of Artificial Sequence: Synthetic oligonucleotide
gcactgtgatccttgcacc

SEQ ID NO: 1584 - DNA, 19 bp, Artificial Sequence
  Description of Artificial Sequence: Synthetic oligonucleotide
tgcactgtgatccttgcac

SEQ ID NO: 1585 - DNA, 19 bp, Artificial Sequence
  Description of Artificial Sequence: Synthetic oligonucleotide
ctgcactgtgatccttgca

SEQ ID NO: 1586 - DNA, 19 bp, Artificial Sequence
  Description of Artificial Sequence: Synthetic oligonucleotide
tctgcactgtgatccttgc

SEQ ID NO: 1587 - DNA, 19 bp, Artificial Sequence
  Description of Artificial Sequence: Synthetic oligonucleotide
atctgcactgtgatccttg

SEQ ID NO: 1588 - DNA, 19 bp, Artificial Sequence
  Description of Artificial Sequence: Synthetic oligonucleotide
catctgcactgtgatcctt

SEQ ID NO: 1589 - DNA, 19 bp, Artificial Sequence
  Description of Artificial Sequence: Synthetic oligonucleotide
gcatctgcactgtgatcct

SEQ ID NO: 1590 - DNA, 19 bp, Artificial Sequence
  Description of Artificial Sequence: Synthetic oligonucleotide
ggcatctgcactgtgatcc

SEQ ID NO: 1591 - DNA, 19 bp, Artificial Sequence
  Description of Artificial Sequence: Synthetic oligonucleotide
tggcatctgcactgtgatc

SEQ ID NO: 1592 - DNA, 19 bp, Artificial Sequence
  Description of Artificial Sequence: Synthetic oligonucleotide
gtggcatctgcactgtgat

SEQ ID NO: 1593 - DNA, 19 bp, Artificial Sequence
  Description of Artificial Sequence: Synthetic oligonucleotide
ggtggcatctgcactgtga

SEQ ID NO: 1594 - DNA, 19 bp, Artificial Sequence
  Description of Artificial Sequence: Synthetic oligonucleotide
aggtggcatctgcactgtg

SEQ ID NO: 1595 - DNA, 19 bp, Artificial Sequence
  Description of Artificial Sequence: Synthetic oligonucleotide
taggtggcatctgcactgt

SEQ ID NO: 1596 - DNA, 19 bp, Artificial Sequence
  Description of Artificial Sequence: Synthetic oligonucleotide
gtaggtggcatctgcactg

SEQ ID NO: 1597 - DNA, 19 bp, Artificial Sequence
  Description of Artificial Sequence: Synthetic oligonucleotide
tgtaggtggcatctgcact

SEQ ID NO: 1598 - DNA, 19 bp, Artificial Sequence
  Description of Artificial Sequence: Synthetic oligonucleotide
ttgtaggtggcatctgcac

SEQ ID NO: 1599 - DNA, 19 bp, Artificial Sequence
  Description of Artificial Sequence: Synthetic oligonucleotide
attgtaggtggcatctgca

SEQ ID NO: 1600 - DNA, 19 bp, Artificial Sequence
  Description of Artificial Sequence: Synthetic oligonucleotide
gattgtaggtggcatctgc

SEQ ID NO: 1601 - DNA, 19 bp, Artificial Sequence
  Description of Artificial Sequence: Synthetic oligonucleotide
cgattgtaggtggcatctg

SEQ ID NO: 1602 - DNA, 19 bp, Artificial Sequence
  Description of Artificial Sequence: Synthetic oligonucleotide
tcgattgtaggtggcatct

SEQ ID NO: 1603 - DNA, 19 bp, Artificial Sequence
  Description of Artificial Sequence: Synthetic oligonucleotide
ctcgattgtaggtggcatc

SEQ ID NO: 1604 - DNA, 19 bp, Artificial Sequence
  Description of Artificial Sequence: Synthetic oligonucleotide
cctcgattgtaggtggcat

SEQ ID NO: 1605 - DNA, 19 bp, Artificial Sequence
  Description of Artificial Sequence: Synthetic oligonucleotide
ccctcgattgtaggtggca

SEQ ID NO: 1606 - DNA, 19 bp, Artificial Sequence
  Description of Artificial Sequence: Synthetic oligonucleotide
gccctcgattgtaggtggc

SEQ ID NO: 1607 - DNA, 19 bp, Artificial Sequence
  Description of Artificial Sequence: Synthetic oligonucleotide
ggccctcgattgtaggtgg

SEQ ID NO: 1608 - DNA, 19 bp, Artificial Sequence
  Description of Artificial Sequence: Synthetic oligonucleotide
tggccctcgattgtaggtg

SEQ ID NO: 1609 - DNA, 19 bp, Artificial Sequence
  Description of Artificial Sequence: Synthetic oligonucleotide
gtggccctcgattgtaggt

SEQ ID NO: 1610 - DNA, 19 bp, Artificial Sequence
  Description of Artificial Sequence: Synthetic oligonucleotide
agtggccctcgattgtagg

SEQ ID NO: 1611 - DNA, 19 bp, Artificial Sequence
  Description of Artificial Sequence: Synthetic oligonucleotide
cagtggccctcgattgtag

SEQ ID NO: 1612 - DNA, 19 bp, Artificial Sequence
  Description of Artificial Sequence: Synthetic oligonucleotide
ccagtggccctcgattgta

SEQ ID NO: 1613 - DNA, 19 bp, Artificial Sequence
  Description of Artificial Sequence: Synthetic oligonucleotide
cccagtggccctcgattgt

SEQ ID NO: 1614 - DNA, 19 bp, Artificial Sequence
  Description of Artificial Sequence: Synthetic oligonucleotide
acccagtggccctcgattg

SEQ ID NO: 1615 - DNA, 19 bp, Artificial Sequence
  Description of Artificial Sequence: Synthetic oligonucleotide
gacccagtggccctcgatt

SEQ ID NO: 1616 - DNA, 19 bp, Artificial Sequence
  Description of Artificial Sequence: Synthetic oligonucleotide
agacccagtggccctcgat

SEQ ID NO: 1617 - DNA, 19 bp, Artificial Sequence
  Description of Artificial Sequence: Synthetic oligonucleotide
gagacccagtggccctcga

SEQ ID NO: 1618 - DNA, 19 bp, Artificial Sequence
  Description of Artificial Sequence: Synthetic oligonucleotide
ggagacccagtggccctcg

SEQ ID NO: 1619 - DNA, 19 bp, Artificial Sequence
  Description of Artificial Sequence: Synthetic oligonucleotide
tggagacccagtggccctc

SEQ ID NO: 1620 - DNA, 19 bp, Artificial Sequence
  Description of Artificial Sequence: Synthetic oligonucleotide
gtggagacccagtggccct

SEQ ID NO: 1621 - DNA, 19 bp, Artificial Sequence
  Description of Artificial Sequence: Synthetic oligonucleotide
tgtggagacccagtggccc

SEQ ID NO: 1622 - DNA, 19 bp, Artificial Sequence
  Description of Artificial Sequence: Synthetic oligonucleotide
ctgtggagacccagtggcc

SEQ ID NO: 1623 - DNA, 19 bp, Artificial Sequence
  Description of Artificial Sequence: Synthetic oligonucleotide
cctgtggagacccagtggc

SEQ ID NO: 1624 - DNA, 19 bp, Artificial Sequence
  Description of Artificial Sequence: Synthetic oligonucleotide
gcctgtggagacccagtgg

SEQ ID NO: 1625 - DNA, 19 bp, Artificial Sequence
  Description of Artificial Sequence: Synthetic oligonucleotide
agcctgtggagacccagtg

SEQ ID NO: 1626 - DNA, 19 bp, Artificial Sequence
  Description of Artificial Sequence: Synthetic oligonucleotide
cagcctgtggagacccagt

SEQ ID NO: 1627 - DNA, 19 bp, Artificial Sequence
  Description of Artificial Sequence: Synthetic oligonucleotide
acagcctgtggagacccag

SEQ ID NO: 1628 - DNA, 19 bp, Artificial Sequence
  Description of Artificial Sequence: Synthetic oligonucleotide
cacagcctgtggagaccca

SEQ ID NO: 1629 - DNA, 19 bp, Artificial Sequence
  Description of Artificial Sequence: Synthetic oligonucleotide
tcacagcctgtggagaccc

SEQ ID NO: 1630 - DNA, 19 bp, Artificial Sequence
  Description of Artificial Sequence: Synthetic oligonucleotide
ttcacagcctgtggagacc

SEQ ID NO: 1631 - DNA, 19 bp, Artificial Sequence
  Description of Artificial Sequence: Synthetic oligonucleotide
cttcacagcctgtggagac

SEQ ID NO: 1632 - DNA, 19 bp, Artificial Sequence
  Description of Artificial Sequence: Synthetic oligonucleotide
acttcacagcctgtggaga

SEQ ID NO: 1633 - DNA, 19 bp, Artificial Sequence
  Description of Artificial Sequence: Synthetic oligonucleotide
tacttcacagcctgtggag

SEQ ID NO: 1634 - DNA, 19 bp, Artificial Sequence
  Description of Artificial Sequence: Synthetic oligonucleotide
ttacttcacagcctgtgga

SEQ ID NO: 1635 - DNA, 19 bp, Artificial Sequence
  Description of Artificial Sequence: Synthetic oligonucleotide
cttacttcacagcctgtgg

SEQ ID NO: 1636 - DNA, 19 bp, Artificial Sequence
  Description of Artificial Sequence: Synthetic oligonucleotide
ccttacttcacagcctgtg

SEQ ID NO: 1637 - DNA, 19 bp, Artificial Sequence
  Description of Artificial Sequence: Synthetic oligonucleotide
accttacttcacagcctgt

SEQ ID NO: 1638 - DNA, 19 bp, Artificial Sequence
  Description of Artificial Sequence: Synthetic oligonucleotide
gaccttacttcacagcctg

SEQ ID NO: 1639 - DNA, 19 bp, Artificial Sequence
  Description of Artificial Sequence: Synthetic oligonucleotide
tgaccttacttcacagcct

SEQ ID NO: 1640 - DNA, 19 bp, Artificial Sequence
  Description of Artificial Sequence: Synthetic oligonucleotide
ctgaccttacttcacagcc

SEQ ID NO: 1641 - DNA, 19 bp, Artificial Sequence
  Description of Artificial Sequence: Synthetic oligonucleotide
cctgaccttacttcacagc

SEQ ID NO: 1642 - DNA, 19 bp, Artificial Sequence
  Description of Artificial Sequence: Synthetic oligonucleotide
gcctgaccttacttcacag

SEQ ID NO: 1643 - DNA, 19 bp, Artificial Sequence
  Description of Artificial Sequence: Synthetic oligonucleotide
ggcctgaccttacttcaca

SEQ ID NO: 1644 - DNA, 19 bp, Artificial Sequence
  Description of Artificial Sequence: Synthetic oligonucleotide
gggcctgaccttacttcac

SEQ ID NO: 1645 - DNA, 19 bp, Artificial Sequence
  Description of Artificial Sequence: Synthetic oligonucleotide
tgggcctgaccttacttca

SEQ ID NO: 1646 - DNA, 19 bp, Artificial Sequence
  Description of Artificial Sequence: Synthetic oligonucleotide
ctgggcctgaccttacttc

SEQ ID NO: 1647 - DNA, 19 bp, Artificial Sequence
  Description of Artificial Sequence: Synthetic oligonucleotide
tctgggcctgaccttactt

SEQ ID NO: 1648 - DNA, 19 bp, Artificial Sequence
  Description of Artificial Sequence: Synthetic oligonucleotide
ctctgggcctgaccttact

SEQ ID NO: 1649 - DNA, 19 bp, Artificial Sequence
  Description of Artificial Sequence: Synthetic oligonucleotide
actctgggcctgaccttac

SEQ ID NO: 1650 - DNA, 19 bp, Artificial Sequence
  Description of Artificial Sequence: Synthetic oligonucleotide
aactctgggcctgacctta

SEQ ID NO: 1651 - DNA, 19 bp, Artificial Sequence
  Description of Artificial Sequence: Synthetic oligonucleotide
gaactctgggcctgacctt

SEQ ID NO: 1652 - DNA, 19 bp, Artificial Sequence
  Description of Artificial Sequence: Synthetic oligonucleotide
tgaactctgggcctgacct

SEQ ID NO: 1653 - DNA, 19 bp, Artificial Sequence
  Description of Artificial Sequence: Synthetic oligonucleotide
atgaactctgggcctgacc

SEQ ID NO: 1654 - DNA, 19 bp, Artificial Sequence
  Description of Artificial Sequence: Synthetic oligonucleotide
gatgaactctgggcctgac

SEQ ID NO: 1655 - DNA, 19 bp, Artificial Sequence
  Description of Artificial Sequence: Synthetic oligonucleotide
tgatgaactctgggcctga

SEQ ID NO: 1656 - DNA, 19 bp, Artificial Sequence
  Description of Artificial Sequence: Synthetic oligonucleotide
gtgatgaactctgggcctg

SEQ ID NO: 1657 - DNA, 19 bp, Artificial Sequence
  Description of Artificial Sequence: Synthetic oligonucleotide
tgtgatgaactctgggcct

SEQ ID NO: 1658 - DNA, 19 bp, Artificial Sequence
  Description of Artificial Sequence: Synthetic oligonucleotide
ttgtgatgaactctgggcc

SEQ ID NO: 1659 - DNA, 19 bp, Artificial Sequence
  Description of Artificial Sequence: Synthetic oligonucleotide
cttgtgatgaactctgggc

SEQ ID NO: 1660 - DNA, 19 bp, Artificial Sequence
  Description of Artificial Sequence: Synthetic oligonucleotide
ccttgtgatgaactctggg

SEQ ID NO: 1661 - DNA, 19 bp, Artificial Sequence
  Description of Artificial Sequence: Synthetic oligonucleotide
accttgtgatgaactctgg

SEQ ID NO: 1662 - DNA, 19 bp, Artificial Sequence
  Description of Artificial Sequence: Synthetic oligonucleotide
gaccttgtgatgaactctg

SEQ ID NO: 1663 - DNA, 19 bp, Artificial Sequence
  Description of Artificial Sequence: Synthetic oligonucleotide
ggaccttgtgatgaactct

SEQ ID NO: 1664 - DNA, 19 bp, Artificial Sequence
  Description of Artificial Sequence: Synthetic oligonucleotide
aggaccttgtgatgaactc

SEQ ID NO: 1665 - DNA, 19 bp, Artificial Sequence
  Description of Artificial Sequence: Synthetic oligonucleotide
taggaccttgtgatgaact

SEQ ID NO: 1666 - DNA, 19 bp, Artificial Sequence
  Description of Artificial Sequence: Synthetic oligonucleotide
gtaggaccttgtgatgaac

SEQ ID NO: 1667 - DNA, 19 bp, Artificial Sequence
  Description of Artificial Sequence: Synthetic oligonucleotide
tgtaggaccttgtgatgaa

SEQ ID NO: 1668 - DNA, 19 bp, Artificial Sequence
  Description of Artificial Sequence: Synthetic oligonucleotide
ctgtaggaccttgtgatga

SEQ ID NO: 1669 - DNA, 19 bp, Artificial Sequence
  Description of Artificial Sequence: Synthetic oligonucleotide
tctgtaggaccttgtgatg

SEQ ID NO: 1670 - DNA, 19 bp, Artificial Sequence
  Description of Artificial Sequence: Synthetic oligonucleotide
atctgtaggaccttgtgat

SEQ ID NO: 1671 - DNA, 19 bp, Artificial Sequence
  Description of Artificial Sequence: Synthetic oligonucleotide
aatctgtaggaccttgtga

SEQ ID NO: 1672 - DNA, 19 bp, Artificial Sequence
  Description of Artificial Sequence: Synthetic oligonucleotide
gaatctgtaggaccttgtg

SEQ ID NO: 1673 - DNA, 19 bp, Artificial Sequence
  Description of Artificial Sequence: Synthetic oligonucleotide
agaatctgtaggaccttgt

SEQ ID NO: 1674 - DNA, 19 bp, Artificial Sequence
  Description of Artificial Sequence: Synthetic oligonucleotide
tagaatctgtaggaccttg

SEQ ID NO: 1675 - DNA, 19 bp, Artificial Sequence
  Description of Artificial Sequence: Synthetic oligonucleotide
gtagaatctgtaggacctt

SEQ ID NO: 1676 - DNA, 19 bp, Artificial Sequence
  Description of Artificial Sequence: Synthetic oligonucleotide
ggtagaatctgtaggacct

SEQ ID NO: 1677 - DNA, 19 bp, Artificial Sequence
  Description of Artificial Sequence: Synthetic oligonucleotide
tggtagaatctgtaggacc

SEQ ID NO: 1678 - DNA, 19 bp, Artificial Sequence
  Description of Artificial Sequence: Synthetic oligonucleotide
gtggtagaatctgtaggac

SEQ ID NO: 1679 - DNA, 19 bp, Artificial Sequence
  Description of Artificial Sequence: Synthetic oligonucleotide
tgtggtagaatctgtagga

SEQ ID NO: 1680 - DNA, 19 bp, Artificial Sequence
  Description of Artificial Sequence: Synthetic oligonucleotide
ttgtggtagaatctgtagg

SEQ ID NO: 1681 - DNA, 19 bp, Artificial Sequence
  Description of Artificial Sequence: Synthetic oligonucleotide
attgtggtagaatctgtag

SEQ ID NO: 1682 - DNA, 19 bp, Artificial Sequence
  Description of Artificial Sequence: Synthetic oligonucleotide
tattgtggtagaatctgta

SEQ ID NO: 1683 - DNA, 19 bp, Artificial Sequence
  Description of Artificial Sequence: Synthetic oligonucleotide
ttattgtggtagaatctgt

SEQ ID NO: 1684 - DNA, 19 bp, Artificial Sequence
  Description of Artificial Sequence: Synthetic oligonucleotide
gttattgtggtagaatctg

SEQ ID NO: 1685 - DNA, 19 bp, Artificial Sequence
  Description of Artificial Sequence: Synthetic oligonucleotide
tgttattgtggtagaatct

SEQ ID NO: 1686 - DNA, 19 bp, Artificial Sequence
  Description of Artificial Sequence: Synthetic oligonucleotide
gtgttattgtggtagaatc

SEQ ID NO: 1687 - DNA, 19 bp, Artificial Sequence
  Description of Artificial Sequence: Synthetic oligonucleotide
ggtgttattgtggtagaat

SEQ ID NO: 1688 - DNA, 19 bp, Artificial Sequence
  Description of Artificial Sequence: Synthetic oligonucleotide
aggtgttattgtggtagaa

SEQ ID NO: 1689 - DNA, 19 bp, Artificial Sequence
  Description of Artificial Sequence: Synthetic oligonucleotide
aaggtgttattgtggtaga

SEQ ID NO: 1690 - DNA, 19 bp, Artificial Sequence
  Description of Artificial Sequence: Synthetic oligonucleotide
gaaggtgttattgtggtag

SEQ ID NO: 1691 - DNA, 19 bp, Artificial Sequence
  Description of Artificial Sequence: Synthetic oligonucleotide
tgaaggtgttattgtggta

SEQ ID NO: 1692 - DNA, 19 bp, Artificial Sequence
  Description of Artificial Sequence: Synthetic oligonucleotide
ttgaaggtgttattgtggt

SEQ ID NO: 1693 - DNA, 19 bp, Artificial Sequence
  Description of Artificial Sequence: Synthetic oligonucleotide
cttgaaggtgttattgtgg

SEQ ID NO: 1694 - DNA, 19 bp, Artificial Sequence
  Description of Artificial Sequence: Synthetic oligonucleotide
ccttgaaggtgttattgtg

SEQ ID NO: 1695 - DNA, 19 bp, Artificial Sequence
  Description of Artificial Sequence: Synthetic oligonucleotide
gccttgaaggtgttattgt

SEQ ID NO: 1696 - DNA, 19 bp, Artificial Sequence
  Description of Artificial Sequence: Synthetic oligonucleotide
ggccttgaaggtgttattg

SEQ ID NO: 1697 - DNA, 19 bp, Artificial Sequence
  Description of Artificial Sequence: Synthetic oligonucleotide
aggccttgaaggtgttatt

SEQ ID NO: 1698 - DNA, 19 bp, Artificial Sequence
  Description of Artificial Sequence: Synthetic oligonucleotide
taggccttgaaggtgttat

SEQ ID NO: 1699 - DNA, 19 bp, Artificial Sequence
  Description of Artificial Sequence: Synthetic oligonucleotide
gtaggccttgaaggtgtta

SEQ ID NO: 1700 - DNA, 19 bp, Artificial Sequence
  Description of Artificial Sequence: Synthetic oligonucleotide
ggtaggccttgaaggtgtt

SEQ ID NO: 1701 - DNA, 19 bp, Artificial Sequence
  Description of Artificial Sequence: Synthetic oligonucleotide
tggtaggccttgaaggtgt

SEQ ID NO: 1702 - DNA, 19 bp, Artificial Sequence
  Description of Artificial Sequence: Synthetic oligonucleotide
ttggtaggccttgaaggtg

SEQ ID NO: 1703 - DNA, 19 bp, Artificial Sequence
  Description of Artificial Sequence: Synthetic oligonucleotide
attggtaggccttgaaggt

SEQ ID NO: 1704 - DNA, 19 bp, Artificial Sequence
  Description of Artificial Sequence: Synthetic oligonucleotide
aattggtaggccttgaagg

SEQ ID NO: 1705 - DNA, 19 bp, Artificial Sequence
  Description of Artificial Sequence: Synthetic oligonucleotide
aaattggtaggccttgaag

SEQ ID NO: 1706 - DNA, 19 bp, Artificial Sequence
  Description of Artificial Sequence: Synthetic oligonucleotide
aaaattggtaggccttgaa

SEQ ID NO: 1707 - DNA, 19 bp, Artificial Sequence
  Description of Artificial Sequence: Synthetic oligonucleotide
taaaattggtaggccttga

SEQ ID NO: 1708 - DNA, 19 bp, Artificial Sequence
  Description of Artificial Sequence: Synthetic oligonucleotide
ataaaattggtaggccttg

SEQ ID NO: 1709 - DNA, 19 bp, Artificial Sequence
  Description of Artificial Sequence: Synthetic oligonucleotide
aataaaattggtaggcctt

SEQ ID NO: 1710 - DNA, 19 bp, Artificial Sequence
  Description of Artificial Sequence: Synthetic oligonucleotide
taataaaattggtaggcct

SEQ ID NO: 1711 - DNA, 19 bp, Artificial Sequence
  Description of Artificial Sequence: Synthetic oligonucleotide
ataataaaattggtaggcc

SEQ ID NO: 1712 - DNA, 19 bp, Artificial Sequence
  Description of Artificial Sequence: Synthetic oligonucleotide
cataataaaattggtaggc

SEQ ID NO: 1713 - DNA, 19 bp, Artificial Sequence
  Description of Artificial Sequence: Synthetic oligonucleotide
ccataataaaattggtagg

SEQ ID NO: 1714 - DNA, 19 bp, Artificial Sequence
  Description of Artificial Sequence: Synthetic oligonucleotide
gccataataaaattggtag

SEQ ID NO: 1715 - DNA, 19 bp, Artificial Sequence
  Description of Artificial Sequence: Synthetic oligonucleotide
tgccataataaaattggta

SEQ ID NO: 1716 - DNA, 19 bp, Artificial Sequence
  Description of Artificial Sequence: Synthetic oligonucleotide
ctgccataataaaattggt

SEQ ID NO: 1717 - DNA, 19 bp, Artificial Sequence
  Description of Artificial Sequence: Synthetic oligonucleotide
gctgccataataaaattgg

SEQ ID NO: 1718 - DNA, 19 bp, Artificial Sequence
  Description of Artificial Sequence: Synthetic oligonucleotide
tgctgccataataaaattg

SEQ ID NO: 1719 - DNA, 19 bp, Artificial Sequence
  Description of Artificial Sequence: Synthetic oligonucleotide
ttgctgccataataaaatt

SEQ ID NO: 1720 - DNA, 19 bp, Artificial Sequence
  Description of Artificial Sequence: Synthetic oligonucleotide
gttgctgccataataaaat

SEQ ID NO: 1721 - DNA, 19 bp, Artificial Sequence
  Description of Artificial Sequence: Synthetic oligonucleotide
ggttgctgccataataaaa

SEQ ID NO: 1722 - DNA, 19 bp, Artificial Sequence
  Description of Artificial Sequence: Synthetic oligonucleotide
cggttgctgccataataaa

SEQ ID NO: 1723 - DNA, 19 bp, Artificial Sequence
  Description of Artificial Sequence: Synthetic oligonucleotide
ccggttgctgccataataa

SEQ ID NO: 1724 - DNA, 19 bp, Artificial Sequence
  Description of Artificial Sequence: Synthetic oligonucleotide
accggttgctgccataata

SEQ ID NO: 1725 - DNA, 19 bp, Artificial Sequence
  Description of Artificial Sequence: Synthetic oligonucleotide
caccggttgctgccataat

SEQ ID NO: 1726 - DNA, 19 bp, Artificial Sequence
  Description of Artificial Sequence: Synthetic oligonucleotide
gcaccggttgctgccataa

SEQ ID NO: 1727 - DNA, 19 bp, Artificial Sequence
  Description of Artificial Sequence: Synthetic oligonucleotide
tgcaccggttgctgccata

SEQ ID NO: 1728 - DNA, 19 bp, Artificial Sequence
  Description of Artificial Sequence: Synthetic oligonucleotide
gtgcaccggttgctgccat

SEQ ID NO: 1729 - DNA, 19 bp, Artificial Sequence
  Description of Artificial Sequence: Synthetic oligonucleotide
tgtgcaccggttgctgcca

SEQ ID NO: 1730 - DNA, 19 bp, Artificial Sequence
  Description of Artificial Sequence: Synthetic oligonucleotide
ttgtgcaccggttgctgcc

SEQ ID NO: 1731 - DNA, 19 bp, Artificial Sequence
  Description of Artificial Sequence: Synthetic oligonucleotide
tttgtgcaccggttgctgc

SEQ ID NO: 1732 - DNA, 19 bp, Artificial Sequence
  Description of Artificial Sequence: Synthetic oligonucleotide
atttgtgcaccggttgctg

SEQ ID NO: 1733 - DNA, 19 bp, Artificial Sequence
  Description of Artificial Sequence: Synthetic oligonucleotide
gatttgtgcaccggttgct

SEQ ID NO: 1734 - DNA, 19 bp, Artificial Sequence
  Description of Artificial Sequence: Synthetic oligonucleotide
ggatttgtgcaccggttgc

SEQ ID NO: 1735 - DNA, 19 bp, Artificial Sequence
  Description of Artificial Sequence: Synthetic oligonucleotide
gggatttgtgcaccggttg

SEQ ID NO: 1736 - DNA, 19 bp, Artificial Sequence
  Description of Artificial Sequence: Synthetic oligonucleotide
tgggatttgtgcaccggtt

SEQ ID NO: 1737 - DNA, 19 bp, Artificial Sequence
  Description of Artificial Sequence: Synthetic oligonucleotide
gtgggatttgtgcaccggt

SEQ ID NO: 1738 - DNA, 19 bp, Artificial Sequence
  Description of Artificial Sequence: Synthetic oligonucleotide
agtgggatttgtgcaccgg

SEQ ID NO: 1739 - DNA, 19 bp, Artificial Sequence
  Description of Artificial Sequence: Synthetic oligonucleotide
aagtgggatttgtgcaccg

SEQ ID NO: 1740 - DNA, 19 bp, Artificial Sequence
  Description of Artificial Sequence: Synthetic oligonucleotide
taagtgggatttgtgcacc

SEQ ID NO: 1741 - DNA, 19 bp, Artificial Sequence
  Description of Artificial Sequence: Synthetic oligonucleotide
ataagtgggatttgtgcac

SEQ ID NO: 1742 - DNA, 19 bp, Artificial Sequence
  Description of Artificial Sequence: Synthetic oligonucleotide
tataagtgggatttgtgca

SEQ ID NO: 1743 - DNA, 19 bp, Artificial Sequence
  Description of Artificial Sequence: Synthetic oligonucleotide
gtataagtgggatttgtgc

SEQ ID NO: 1744 - DNA, 19 bp, Artificial Sequence
  Description of Artificial Sequence: Synthetic oligonucleotide
agtataagtgggatttgtg

SEQ ID NO: 1745 - DNA, 19 bp, Artificial Sequence
  Description of Artificial Sequence: Synthetic oligonucleotide
gagtataagtgggatttgt

SEQ ID NO: 1746 - DNA, 19 bp, Artificial Sequence
  Description of Artificial Sequence: Synthetic oligonucleotide
agagtataagtgggatttg

SEQ ID NO: 1747 - DNA, 19 bp, Artificial Sequence
  Description of Artificial Sequence: Synthetic oligonucleotide
gagagtataagtgggattt

SEQ ID NO: 1748 - DNA, 19 bp, Artificial Sequence
  Description of Artificial Sequence: Synthetic oligonucleotide
tgagagtataagtgggatt

SEQ ID NO: 1749 - DNA, 19 bp, Artificial Sequence
  Description of Artificial Sequence: Synthetic oligonucleotide
atgagagtataagtgggat

SEQ ID NO: 1750 - DNA, 19 bp, Artificial Sequence
  Description of Artificial Sequence: Synthetic oligonucleotide
gatgagagtataagtggga

SEQ ID NO: 1751 - DNA, 19 bp, Artificial Sequence
  Description of Artificial Sequence: Synthetic oligonucleotide
tgatgagagtataagtggg

SEQ ID NO: 1752 - DNA, 19 bp, Artificial Sequence
  Description of Artificial Sequence: Synthetic oligonucleotide
atgatgagagtataagtgg

SEQ ID NO: 1753 - DNA, 19 bp, Artificial Sequence
  Description of Artificial Sequence: Synthetic oligonucleotide
gatgatgagagtataagtg

SEQ ID NO: 1754 - DNA, 19 bp, Artificial Sequence
  Description of Artificial Sequence: Synthetic oligonucleotide
ggatgatgagagtataagt

SEQ ID NO: 1755 - DNA, 19 bp, Artificial Sequence
  Description of Artificial Sequence: Synthetic oligonucleotide
cggatgatgagagtataag

SEQ ID NO: 1756 - DNA, 19 bp, Artificial Sequence
  Description of Artificial Sequence: Synthetic oligonucleotide
ccggatgatgagagtataa

SEQ ID NO: 1757 - DNA, 19 bp, Artificial Sequence
  Description of Artificial Sequence: Synthetic oligonucleotide
cccggatgatgagagtata

SEQ ID NO: 1758 - DNA, 19 bp, Artificial Sequence
  Description of Artificial Sequence: Synthetic oligonucleotide
ccccggatgatgagagtat

SEQ ID NO: 1759 - DNA, 19 bp, Artificial Sequence
  Description of Artificial Sequence: Synthetic oligonucleotide
gccccggatgatgagagta

SEQ ID NO: 1760 - DNA, 19 bp, Artificial Sequence
  Description of Artificial Sequence: Synthetic oligonucleotide
tgccccggatgatgagagt

SEQ ID NO: 1761 - DNA, 19 bp, Artificial Sequence
  Description of Artificial Sequence: Synthetic oligonucleotide
ttgccccggatgatgagag

SEQ ID NO: 1762 - DNA, 19 bp, Artificial Sequence
  Description of Artificial Sequence: Synthetic oligonucleotide
cttgccccggatgatgaga

SEQ ID NO: 1763 - DNA, 19 bp, Artificial Sequence
  Description of Artificial Sequence: Synthetic oligonucleotide
tcttgccccggatgatgag

SEQ ID NO: 1764 - DNA, 19 bp, Artificial Sequence
  Description of Artificial Sequence: Synthetic oligonucleotide
atcttgccccggatgatga

SEQ ID NO: 1765 - DNA, 19 bp, Artificial Sequence
  Description of Artificial Sequence: Synthetic oligonucleotide
gatcttgccccggatgatg

SEQ ID NO: 1766 - DNA, 19 bp, Artificial Sequence
  Description of Artificial Sequence: Synthetic oligonucleotide
ggatcttgccccggatgat

SEQ ID NO: 1767 - DNA, 19 bp, Artificial Sequence
  Description of Artificial Sequence: Synthetic oligonucleotide
cggatcttgccccggatga

SEQ ID NO: 1768 - DNA, 19 bp, Artificial Sequence
  Description of Artificial Sequence: Synthetic oligonucleotide
gcggatcttgccccggatg

SEQ ID NO: 1769 - DNA, 19 bp, Artificial Sequence
  Description of Artificial Sequence: Synthetic oligonucleotide
ggcggatcttgccccggat

SEQ ID NO: 1770 - DNA, 19 bp, Artificial Sequence
  Description of Artificial Sequence: Synthetic oligonucleotide
aggcggatcttgccccgga

SEQ ID NO: 1771 - DNA, 19 bp, Artificial Sequence
  Description of Artificial Sequence: Synthetic oligonucleotide
gaggcggatcttgccccgg

SEQ ID NO: 1772 - DNA, 19 bp, Artificial Sequence
  Description of Artificial Sequence: Synthetic oligonucleotide
ggaggcggatcttgccccg

SEQ ID NO: 1773 - DNA, 19 bp, Artificial Sequence
  Description of Artificial Sequence: Synthetic oligonucleotide
cggaggcggatcttgcccc

SEQ ID NO: 1774 - DNA, 19 bp, Artificial Sequence
  Description of Artificial Sequence: Synthetic oligonucleotide
gcggaggcggatcttgccc

SEQ ID NO: 1775 - DNA, 19 bp, Artificial Sequence
  Description of Artificial Sequence: Synthetic oligonucleotide
ggcggaggcggatcttgcc

SEQ ID NO: 1776 - DNA, 19 bp, Artificial Sequence
  Description of Artificial Sequence: Synthetic oligonucleotide
tggcggaggcggatcttgc

SEQ ID NO: 1777 - DNA, 19 bp, Artificial Sequence
  Description of Artificial Sequence: Synthetic oligonucleotide
ctggcggaggcggatcttg

SEQ ID NO: 1778 - DNA, 19 bp, Artificial Sequence
  Description of Artificial Sequence: Synthetic oligonucleotide
cctggcggaggcggatctt

SEQ ID NO: 1779 - DNA, 19 bp, Artificial Sequence
  Description of Artificial Sequence: Synthetic oligonucleotide
gcctggcggaggcggatct

SEQ ID NO: 1780 - DNA, 19 bp, Artificial Sequence
  Description of Artificial Sequence: Synthetic oligonucleotide
ggcctggcggaggcggatc

SEQ ID NO: 1781 - DNA, 19 bp, Artificial Sequence
  Description of Artificial Sequence: Synthetic oligonucleotide
aggcctggcggaggcggat

SEQ ID NO: 1782 - DNA, 19 bp, Artificial Sequence
  Description of Artificial Sequence: Synthetic oligonucleotide
gaggcctggcggaggcgga

SEQ ID NO: 1783 - DNA, 19 bp, Artificial Sequence
  Description of Artificial Sequence: Synthetic oligonucleotide
ggaggcctggcggaggcgg

SEQ ID NO: 1784 - DNA, 19 bp, Artificial Sequence
  Description of Artificial Sequence: Synthetic oligonucleotide
aggaggcctggcggaggcg

SEQ ID NO: 1785 - DNA, 19 bp, Artificial Sequence
  Description of Artificial Sequence: Synthetic oligonucleotide
caggaggcctggcggaggc

SEQ ID NO: 1786 - DNA, 19 bp, Artificial Sequence
  Description of Artificial Sequence: Synthetic oligonucleotide
ccaggaggcctggcggagg

SEQ ID NO: 1787 - DNA, 19 bp, Artificial Sequence
  Description of Artificial Sequence: Synthetic oligonucleotide
tccaggaggcctggcggag

SEQ ID NO: 1788 - DNA, 19 bp, Artificial Sequence
  Description of Artificial Sequence: Synthetic oligonucleotide
atccaggaggcctggcgga

SEQ ID NO: 1789 - DNA, 19 bp, Artificial Sequence
  Description of Artificial Sequence: Synthetic oligonucleotide
gatccaggaggcctggcgg

SEQ ID NO: 1790 - DNA, 19 bp, Artificial Sequence
  Description of Artificial Sequence: Synthetic oligonucleotide
tgatccaggaggcctggcg

SEQ ID NO: 1791 - DNA, 19 bp, Artificial Sequence
  Description of Artificial Sequence: Synthetic oligonucleotide
atgatccaggaggcctggc

SEQ ID NO: 1792 - DNA, 19 bp, Artificial Sequence
  Description of Artificial Sequence: Synthetic oligonucleotide
gatgatccaggaggcctgg

SEQ ID NO: 1793 - DNA, 19 bp, Artificial Sequence
  Description of Artificial Sequence: Synthetic oligonucleotide
ggatgatccaggaggcctg

SEQ ID NO: 1794 - DNA, 19 bp, Artificial Sequence
  Description of Artificial Sequence: Synthetic oligonucleotide
cggatgatccaggaggcct

SEQ ID NO: 1795 - DNA, 19 bp, Artificial Sequence
  Description of Artificial Sequence: Synthetic oligonucleotide
tcggatgatccaggaggcc

SEQ ID NO: 1796 - DNA, 19 bp, Artificial Sequence
  Description of Artificial Sequence: Synthetic oligonucleotide
ctcggatgatccaggaggc

SEQ ID NO: 1797 - DNA, 19 bp, Artificial Sequence
  Description of Artificial Sequence: Synthetic oligonucleotide
cctcggatgatccaggagg

SEQ ID NO: 1798 - DNA, 19 bp, Artificial Sequence
  Description of Artificial Sequence: Synthetic oligonucleotide
ccctcggatgatccaggag

SEQ ID NO: 1799 - DNA, 19 bp, Artificial Sequence
  Description of Artificial Sequence: Synthetic oligonucleotide
cccctcggatgatccagga

SEQ ID NO: 1800 - DNA, 19 bp, Artificial Sequence
  Description of Artificial Sequence: Synthetic oligonucleotide
ccccctcggatgatccagg

SEQ ID NO: 1801 - DNA, 19 bp, Artificial Sequence
  Description of Artificial Sequence: Synthetic oligonucleotide
gccccctcggatgatccag

SEQ ID NO: 1802 - DNA, 19 bp, Artificial Sequence
  Description of Artificial Sequence: Synthetic oligonucleotide
tgccccctcggatgatcca

SEQ ID NO: 1803 - DNA, 19 bp, Artificial Sequence
  Description of Artificial Sequence: Synthetic oligonucleotide
gtgccccctcggatgatcc

SEQ ID NO: 1804 - DNA, 19 bp, Artificial Sequence
  Description of Artificial Sequence: Synthetic oligonucleotide
cgtgccccctcggatgatc

SEQ ID NO: 1805 - DNA, 19 bp, Artificial Sequence
  Description of Artificial Sequence: Synthetic oligonucleotide
ccgtgccccctcggatgat

SEQ ID NO: 1806 - DNA, 19 bp, Artificial Sequence
  Description of Artificial Sequence: Synthetic oligonucleotide
tccgtgccccctcggatga

SEQ ID NO: 1807 - DNA, 19 bp, Artificial Sequence
  Description of Artificial Sequence: Synthetic oligonucleotide
ttccgtgccccctcggatg

SEQ ID NO: 1808 - DNA, 19 bp, Artificial Sequence
  Description of Artificial Sequence: Synthetic oligonucleotide
cttccgtgccccctcggat

SEQ ID NO: 1809 - DNA, 19 bp, Artificial Sequence
  Description of Artificial Sequence: Synthetic oligonucleotide
gcttccgtgccccctcgga

SEQ ID NO: 1810 - DNA, 19 bp, Artificial Sequence
  Description of Artificial Sequence: Synthetic oligonucleotide
ggcttccgtgccccctcgg

SEQ ID NO: 1811 - DNA, 19 bp, Artificial Sequence
  Description of Artificial Sequence: Synthetic oligonucleotide
cggcttccgtgccccctcg

SEQ ID NO: 1812 - DNA, 19 bp, Artificial Sequence
  Description of Artificial Sequence: Synthetic oligonucleotide
tcggcttccgtgccccctc

SEQ ID NO: 1813 - DNA, 19 bp, Artificial Sequence
  Description of Artificial Sequence: Synthetic oligonucleotide
gtcggcttccgtgccccct

SEQ ID NO: 1814 - DNA, 19 bp, Artificial Sequence
  Description of Artificial Sequence: Synthetic oligonucleotide
agtcggcttccgtgccccc

SEQ ID NO: 1815 - DNA, 19 bp, Artificial Sequence
  Description of Artificial Sequence: Synthetic oligonucleotide
tagtcggcttccgtgcccc

SEQ ID NO: 1816 - DNA, 19 bp, Artificial Sequence
  Description of Artificial Sequence: Synthetic oligonucleotide
gtagtcggcttccgtgccc

SEQ ID NO: 1817 - DNA, 19 bp, Artificial Sequence
  Description of Artificial Sequence: Synthetic oligonucleotide
ggtagtcggcttccgtgcc

SEQ ID NO: 1818 - DNA, 19 bp, Artificial Sequence
  Description of Artificial Sequence: Synthetic oligonucleotide
tggtagtcggcttccgtgc

SEQ ID NO: 1819 - DNA, 19 bp, Artificial Sequence
  Description of Artificial Sequence: Synthetic oligonucleotide
ctggtagtcggcttccgtg

SEQ ID NO: 1820 - DNA, 19 bp, Artificial Sequence
  Description of Artificial Sequence: Synthetic oligonucleotide
gctggtagtcggcttccgt

SEQ ID NO: 1821 - DNA, 19 bp, Artificial Sequence
  Description of Artificial Sequence: Synthetic oligonucleotide
agctggtagtcggcttccg

SEQ ID NO: 1822 - DNA, 19 bp, Artificial Sequence
  Description of Artificial Sequence: Synthetic oligonucleotide
cagctggtagtcggcttcc

SEQ ID NO: 1823 - DNA, 19 bp, Artificial Sequence
  Description of Artificial Sequence: Synthetic oligonucleotide
gcagctggtagtcggcttc

SEQ ID NO: 1824 - DNA, 19 bp, Artificial Sequence
  Description of Artificial Sequence: Synthetic oligonucleotide
tgcagctggtagtcggctt

SEQ ID NO: 1825 - DNA, 19 bp, Artificial Sequence
  Description of Artificial Sequence: Synthetic oligonucleotide
gtgcagctggtagtcggct

SEQ ID NO: 1826 - DNA, 19 bp, Artificial Sequence
  Description of Artificial Sequence: Synthetic oligonucleotide
tgtgcagctggtagtcggc

SEQ ID NO: 1827 - DNA, 19 bp, Artificial Sequence
  Description of Artificial Sequence: Synthetic oligonucleotide
ttgtgcagctggtagtcgg

SEQ ID NO: 1828 - DNA, 19 bp, Artificial Sequence
  Description of Artificial Sequence: Synthetic oligonucleotide
gttgtgcagctggtagtcg

SEQ ID NO: 1829 - DNA, 19 bp, Artificial Sequence
  Description of Artificial Sequence: Synthetic oligonucleotide
cgttgtgcagctggtagtc

SEQ ID NO: 1830 - DNA, 19 bp, Artificial Sequence
  Description of Artificial Sequence: Synthetic oligonucleotide
acgttgtgcagctggtagt

SEQ ID NO: 1831 - DNA, 19 bp, Artificial Sequence
  Description of Artificial Sequence: Synthetic oligonucleotide
gacgttgtgcagctggtag

SEQ ID NO: 1832 - DNA, 19 bp, Artificial Sequence
  Description of Artificial Sequence: Synthetic oligonucleotide
ggacgttgtgcagctggta

SEQ ID NO: 1833 - DNA, 19 bp, Artificial Sequence
  Description of Artificial Sequence: Synthetic oligonucleotide
tggacgttgtgcagctggt

SEQ ID NO: 1834 - DNA, 19 bp, Artificial Sequence
  Description of Artificial Sequence: Synthetic oligonucleotide
ctggacgttgtgcagctgg

SEQ ID NO: 1835 - DNA, 19 bp, Artificial Sequence
  Description of Artificial Sequence: Synthetic oligonucleotide
cctggacgttgtgcagctg

SEQ ID NO: 1836 - DNA, 19 bp, Artificial Sequence
  Description of Artificial Sequence: Synthetic oligonucleotide
acctggacgttgtgcagct

SEQ ID NO: 1837 - DNA, 19 bp, Artificial Sequence
  Description of Artificial Sequence: Synthetic oligonucleotide
cacctggacgttgtgcagc

SEQ ID NO: 1838 - DNA, 19 bp, Artificial Sequence
  Description of Artificial Sequence: Synthetic oligonucleotide
tcacctggacgttgtgcag

SEQ ID NO: 1839 - DNA, 19 bp, Artificial Sequence
  Description of Artificial Sequence: Synthetic oligonucleotide
atcacctggacgttgtgca

SEQ ID NO: 1840 - DNA, 19 bp, Artificial Sequence
  Description of Artificial Sequence: Synthetic oligonucleotide
gatcacctggacgttgtgc

SEQ ID NO: 1841 - DNA, 19 bp, Artificial Sequence
  Description of Artificial Sequence: Synthetic oligonucleotide
agatcacctggacgttgtg

SEQ ID NO: 1842 - DNA, 19 bp, Artificial Sequence
  Description of Artificial Sequence: Synthetic oligonucleotide
cagatcacctggacgttgt

SEQ ID NO: 1843 - DNA, 19 bp, Artificial Sequence
  Description of Artificial Sequence: Synthetic oligonucleotide
gcagatcacctggacgttg

SEQ ID NO: 1844 - DNA, 19 bp, Artificial Sequence
  Description of Artificial Sequence: Synthetic oligonucleotide
ggcagatcacctggacgtt

SEQ ID NO: 1845 - DNA, 19 bp, Artificial Sequence
  Description of Artificial Sequence: Synthetic oligonucleotide
tggcagatcacctggacgt

SEQ ID NO: 1846 - DNA, 19 bp, Artificial Sequence
  Description of Artificial Sequence: Synthetic oligonucleotide
gtggcagatcacctggacg

SEQ ID NO: 1847 - DNA, 19 bp, Artificial Sequence
  Description of Artificial Sequence: Synthetic oligonucleotide
tgtggcagatcacctggac

SEQ ID NO: 1848 - DNA, 19 bp, Artificial Sequence
  Description of Artificial Sequence: Synthetic oligonucleotide
gtgtggcagatcacctgga

SEQ ID NO: 1849 - DNA, 19 bp, Artificial Sequence
  Description of Artificial Sequence: Synthetic oligonucleotide
tgtgtggcagatcacctgg

SEQ ID NO: 1850 - DNA, 19 bp, Artificial Sequence
  Description of Artificial Sequence: Synthetic oligonucleotide
ctgtgtggcagatcacctg

SEQ ID NO: 1851 - DNA, 19 bp, Artificial Sequence
  Description of Artificial Sequence: Synthetic oligonucleotide
tctgtgtggcagatcacct

SEQ ID NO: 1852 - DNA, 19 bp, Artificial Sequence
  Description of Artificial Sequence: Synthetic oligonucleotide
ctctgtgtggcagatcacc

SEQ ID NO: 1853 - DNA, 19 bp, Artificial Sequence
  Description of Artificial Sequence: Synthetic oligonucleotide
cctctgtgtggcagatcac

SEQ ID NO: 1854 - DNA, 19 bp, Artificial Sequence
  Description of Artificial Sequence: Synthetic oligonucleotide
gcctctgtgtggcagatca

SEQ ID NO: 1855 - DNA, 19 bp, Artificial Sequence
  Description of Artificial Sequence: Synthetic oligonucleotide
cgcctctgtgtggcagatc

SEQ ID NO: 1856 - DNA, 19 bp, Artificial Sequence
  Description of Artificial Sequence: Synthetic oligonucleotide
ccgcctctgtgtggcagat

SEQ ID NO: 1857 - DNA, 19 bp, Artificial Sequence
  Description of Artificial Sequence: Synthetic oligonucleotide
accgcctctgtgtggcaga

SEQ ID NO: 1858 - DNA, 19 bp, Artificial Sequence
  Description of Artificial Sequence: Synthetic oligonucleotide
caccgcctctgtgtggcag

SEQ ID NO: 1859 - DNA, 19 bp, Artificial Sequence
  Description of Artificial Sequence: Synthetic oligonucleotide
ccaccgcctctgtgtggca

SEQ ID NO: 1860 - DNA, 19 bp, Artificial Sequence
  Description of Artificial Sequence: Synthetic oligonucleotide
gccaccgcctctgtgtggc

SEQ ID NO: 1861 - DNA, 19 bp, Artificial Sequence
  Description of Artificial Sequence: Synthetic oligonucleotide
ggccaccgcctctgtgtgg

SEQ ID NO: 1862 - DNA, 19 bp, Artificial Sequence
  Description of Artificial Sequence: Synthetic oligonucleotide
cggccaccgcctctgtgtg

SEQ ID NO: 1863 - DNA, 19 bp, Artificial Sequence
  Description of Artificial Sequence: Synthetic oligonucleotide
tcggccaccgcctctgtgt

SEQ ID NO: 1864 - DNA, 19 bp, Artificial Sequence
  Description of Artificial Sequence: Synthetic oligonucleotide
ctcggccaccgcctctgtg

SEQ ID NO: 1865 - DNA, 19 bp, Artificial Sequence
  Description of Artificial Sequence: Synthetic oligonucleotide
tctcggccaccgcctctgt

SEQ ID NO: 1866 - DNA, 19 bp, Artificial Sequence
  Description of Artificial Sequence: Synthetic oligonucleotide
ttctcggccaccgcctctg

SEQ ID NO: 1867 - DNA, 19 bp, Artificial Sequence
  Description of Artificial Sequence: Synthetic oligonucleotide
cttctcggccaccgcctct

SEQ ID NO: 1868 - DNA, 19 bp, Artificial Sequence
  Description of Artificial Sequence: Synthetic oligonucleotide
gcttctcggccaccgcctc

SEQ ID NO: 1869 - DNA, 19 bp, Artificial Sequence
  Description of Artificial Sequence: Synthetic oligonucleotide
agcttctcggccaccgcct

SEQ ID NO: 1870 - DNA, 19 bp, Artificial Sequence
  Description of Artificial Sequence: Synthetic oligonucleotide
gagcttctcggccaccgcc

SEQ ID NO: 1871 - DNA, 19 bp, Artificial Sequence
  Description of Artificial Sequence: Synthetic oligonucleotide
cgagcttctcggccaccgc

SEQ ID NO: 1872 - DNA, 19 bp, Artificial Sequence
  Description of Artificial Sequence: Synthetic oligonucleotide
ccgagcttctcggccaccg

SEQ ID NO: 1873 - DNA, 19 bp, Artificial Sequence
  Description of Artificial Sequence: Synthetic oligonucleotide
gccgagcttctcggccacc

SEQ ID NO: 1874 - DNA, 19 bp, Artificial Sequence
  Description of Artificial Sequence: Synthetic oligonucleotide
ggccgagcttctcggccac

SEQ ID NO: 1875 - DNA, 19 bp, Artificial Sequence
  Description of Artificial Sequence: Synthetic oligonucleotide
tggccgagcttctcggcca

SEQ ID NO: 1876 - DNA, 19 bp, Artificial Sequence
  Description of Artificial Sequence: Synthetic oligonucleotide
ctggccgagcttctcggcc

SEQ ID NO: 1877 - DNA, 19 bp, Artificial Sequence
  Description of Artificial Sequence: Synthetic oligonucleotide
gctggccgagcttctcggc

SEQ ID NO: 1878 - DNA, 19 bp, Artificial Sequence
  Description of Artificial Sequence: Synthetic oligonucleotide
tgctggccgagcttctcgg

SEQ ID NO: 1879 - DNA, 19 bp, Artificial Sequence
  Description of Artificial Sequence: Synthetic oligonucleotide
ctgctggccgagcttctcg

SEQ ID NO: 1880 - DNA, 19 bp, Artificial Sequence
  Description of Artificial Sequence: Synthetic oligonucleotide
cctgctggccgagcttctc

SEQ ID NO: 1881 - DNA, 19 bp, Artificial Sequence
  Description of Artificial Sequence: Synthetic oligonucleotide
acctgctggccgagcttct

SEQ ID NO: 1882 - DNA, 19 bp, Artificial Sequence
  Description of Artificial Sequence: Synthetic oligonucleotide
cacctgctggccgagcttc

SEQ ID NO: 1883 - DNA, 19 bp, Artificial Sequence
  Description of Artificial Sequence: Synthetic oligonucleotide
tcacctgctggccgagctt

SEQ ID NO: 1884 - DNA, 19 bp, Artificial Sequence
  Description of Artificial Sequence: Synthetic oligonucleotide
ttcacctgctggccgagct

SEQ ID NO: 1885 - DNA, 19 bp, Artificial Sequence
  Description of Artificial Sequence: Synthetic oligonucleotide
gttcacctgctggccgagc

SEQ ID NO: 1886 - DNA, 19 bp, Artificial Sequence
  Description of Artificial Sequence: Synthetic oligonucleotide
ggttcacctgctggccgag

SEQ ID NO: 1887 - DNA, 19 bp, Artificial Sequence
  Description of Artificial Sequence: Synthetic oligonucleotide
cggttcacctgctggccga

SEQ ID NO: 1888 - DNA, 19 bp, Artificial Sequence
  Description of Artificial Sequence: Synthetic oligonucleotide
gcggttcacctgctggccg

SEQ ID NO: 1889 - DNA, 19 bp, Artificial Sequence
  Description of Artificial Sequence: Synthetic oligonucleotide
tgcggttcacctgctggcc

SEQ ID NO: 1890 - DNA, 19 bp, Artificial Sequence
  Description of Artificial Sequence: Synthetic oligonucleotide
gtgcggttcacctgctggc

SEQ ID NO: 1891 - DNA, 19 bp, Artificial Sequence
  Description of Artificial Sequence: Synthetic oligonucleotide
tgtgcggttcacctgctgg

SEQ ID NO: 1892 - DNA, 19 bp, Artificial Sequence
  Description of Artificial Sequence: Synthetic oligonucleotide
atgtgcggttcacctgctg

SEQ ID NO: 1893 - DNA, 19 bp, Artificial Sequence
  Description of Artificial Sequence: Synthetic oligonucleotide
catgtgcggttcacctgct

SEQ ID NO: 1894 - DNA, 19 bp, Artificial Sequence
  Description of Artificial Sequence: Synthetic oligonucleotide
gcatgtgcggttcacctgc

SEQ ID NO: 1895 - DNA, 19 bp, Artificial Sequence
  Description of Artificial Sequence: Synthetic oligonucleotide
ggcatgtgcggttcacctg

SEQ ID NO: 1896 - DNA, 19 bp, Artificial Sequence
  Description of Artificial Sequence: Synthetic oligonucleotide
gggcatgtgcggttcacct

SEQ ID NO: 1897 - DNA, 19 bp, Artificial Sequence
  Description of Artificial Sequence: Synthetic oligonucleotide
cgggcatgtgcggttcacc

SEQ ID NO: 1898 - DNA, 19 bp, Artificial Sequence
  Description of Artificial Sequence: Synthetic oligonucleotide
ccgggcatgtgcggttcac

SEQ ID NO: 1899 - DNA, 19 bp, Artificial Sequence
  Description of Artificial Sequence: Synthetic oligonucleotide
cccgggcatgtgcggttca

SEQ ID NO: 1900 - DNA, 19 bp, Artificial Sequence
  Description of Artificial Sequence: Synthetic oligonucleotide
gcccgggcatgtgcggttc

SEQ ID NO: 1901 - DNA, 19 bp, Artificial Sequence
  Description of Artificial Sequence: Synthetic oligonucleotide
agcccgggcatgtgcggtt

SEQ ID NO: 1902 - DNA, 19 bp, Artificial Sequence
  Description of Artificial Sequence: Synthetic oligonucleotide
aagcccgggcatgtgcggt

SEQ ID NO: 1903 - DNA, 19 bp, Artificial Sequence
  Description of Artificial Sequence: Synthetic oligonucleotide
gaagcccgggcatgtgcgg

SEQ ID NO: 1904 - DNA, 19 bp, Artificial Sequence
  Description of Artificial Sequence: Synthetic oligonucleotide
ggaagcccgggcatgtgcg

SEQ ID NO: 1905 - DNA, 19 bp, Artificial Sequence
  Description of Artificial Sequence: Synthetic oligonucleotide
aggaagcccgggcatgtgc

SEQ ID NO: 1906 - DNA, 19 bp, Artificial Sequence
  Description of Artificial Sequence: Synthetic oligonucleotide
gaggaagcccgggcatgtg

SEQ ID NO: 1907 - DNA, 19 bp, Artificial Sequence
  Description of Artificial Sequence: Synthetic oligonucleotide
cgaggaagcccgggcatgt

SEQ ID NO: 1908 - DNA, 19 bp, Artificial Sequence
  Description of Artificial Sequence: Synthetic oligonucleotide
gcgaggaagcccgggcatg

SEQ ID NO: 1909 - DNA, 19 bp, Artificial Sequence
  Description of Artificial Sequence: Synthetic oligonucleotide
tgcgaggaagcccgggcat

SEQ ID NO: 1910 - DNA, 19 bp, Artificial Sequence
  Description of Artificial Sequence: Synthetic oligonucleotide
ctgcgaggaagcccgggca

SEQ ID NO: 1911 - DNA, 19 bp, Artificial Sequence
  Description of Artificial Sequence: Synthetic oligonucleotide
tctgcgaggaagcccgggc

SEQ ID NO: 1912 - DNA, 19 bp, Artificial Sequence
  Description of Artificial Sequence: Synthetic oligonucleotide
gtctgcgaggaagcccggg

SEQ ID NO: 1913 - DNA, 19 bp, Artificial Sequence
  Description of Artificial Sequence: Synthetic oligonucleotide
cgtctgcgaggaagcccgg

SEQ ID NO: 1914 - DNA, 19 bp, Artificial Sequence
  Description of Artificial Sequence: Synthetic oligonucleotide
ccgtctgcgaggaagcccg

SEQ ID NO: 1915 - DNA, 19 bp, Artificial Sequence
  Description of Artificial Sequence: Synthetic oligonucleotide
cccgtctgcgaggaagccc

SEQ ID NO: 1916 - DNA, 19 bp, Artificial Sequence
  Description of Artificial Sequence: Synthetic oligonucleotide
ccccgtctgcgaggaagcc

SEQ ID NO: 1917 - DNA, 19 bp, Artificial Sequence
  Description of Artificial Sequence: Synthetic oligonucleotide
cccccgtctgcgaggaagc

SEQ ID NO: 1918 - DNA, 19 bp, Artificial Sequence
  Description of Artificial Sequence: Synthetic oligonucleotide
acccccgtctgcgaggaag

SEQ ID NO: 1919 - DNA, 19 bp, Artificial Sequence
  Description of Artificial Sequence: Synthetic oligonucleotide
gacccccgtctgcgaggaa

SEQ ID NO: 1920 - DNA, 19 bp, Artificial Sequence
  Description of Artificial Sequence: Synthetic oligonucleotide
ggacccccgtctgcgagga

SEQ ID NO: 1921 - DNA, 19 bp, Artificial Sequence
  Description of Artificial Sequence: Synthetic oligonucleotide
gggacccccgtctgcgagg

SEQ ID NO: 1922 - DNA, 19 bp, Artificial Sequence
  Description of Artificial Sequence: Synthetic oligonucleotide
agggacccccgtctgcgag

SEQ ID NO: 1923 - DNA, 19 bp, Artificial Sequence
  Description of Artificial Sequence: Synthetic oligonucleotide
cagggacccccgtctgcga

SEQ ID NO: 1924 - DNA, 19 bp, Artificial Sequence
  Description of Artificial Sequence: Synthetic oligonucleotide
ccagggacccccgtctgcg

SEQ ID NO: 1925 - DNA, 19 bp, Artificial Sequence
  Description of Artificial Sequence: Synthetic oligonucleotide
cccagggacccccgtctgc

SEQ ID NO: 1926 - DNA, 19 bp, Artificial Sequence
  Description of Artificial Sequence: Synthetic oligonucleotide
acccagggacccccgtctg

SEQ ID NO: 1927 - DNA, 19 bp, Artificial Sequence
  Description of Artificial Sequence: Synthetic oligonucleotide
cacccagggacccccgtct

SEQ ID NO: 1928 - DNA, 19 bp, Artificial Sequence
  Description of Artificial Sequence: Synthetic oligonucleotide
gcacccagggacccccgtc

SEQ ID NO: 1929 - DNA, 19 bp, Artificial Sequence
  Description of Artificial Sequence: Synthetic oligonucleotide
tgcacccagggacccccgt

SEQ ID NO: 1930 - DNA, 19 bp, Artificial Sequence
  Description of Artificial Sequence: Synthetic oligonucleotide
ctgcacccagggacccccg

SEQ ID NO: 1931 - DNA, 19 bp, Artificial Sequence
  Description of Artificial Sequence: Synthetic oligonucleotide
cctgcacccagggaccccc

SEQ ID NO: 1932 - DNA, 19 bp, Artificial Sequence
  Description of Artificial Sequence: Synthetic oligonucleotide
tcctgcacccagggacccc

SEQ ID NO: 1933 - DNA, 19 bp, Artificial Sequence
  Description of Artificial Sequence: Synthetic oligonucleotide
gtcctgcacccagggaccc

SEQ ID NO: 1934 - DNA, 19 bp, Artificial Sequence
  Description of Artificial Sequence: Synthetic oligonucleotide
cgtcctgcacccagggacc

SEQ ID NO: 1935 - DNA, 19 bp, Artificial Sequence
  Description of Artificial Sequence: Synthetic oligonucleotide
acgtcctgcacccagggac

SEQ ID NO: 1936 - DNA, 19 bp, Artificial Sequence
  Description of Artificial Sequence: Synthetic oligonucleotide
cacgtcctgcacccaggga

SEQ ID NO: 1937 - DNA, 19 bp, Artificial Sequence
  Description of Artificial Sequence: Synthetic oligonucleotide
ccacgtcctgcacccaggg

SEQ ID NO: 1938 - DNA, 19 bp, Artificial Sequence
  Description of Artificial Sequence: Synthetic oligonucleotide
gccacgtcctgcacccagg

SEQ ID NO: 1939 - DNA, 19 bp, Artificial Sequence
  Description of Artificial Sequence: Synthetic oligonucleotide
ggccacgtcctgcacccag

SEQ ID NO: 1940 - DNA, 19 bp, Artificial Sequence
  Description of Artificial Sequence: Synthetic oligonucleotide
aggccacgtcctgcaccca

SEQ ID NO: 1941 - DNA, 19 bp, Artificial Sequence
  Description of Artificial Sequence: Synthetic oligonucleotide
taggccacgtcctgcaccc

SEQ ID NO: 1942 - DNA, 19 bp, Artificial Sequence
  Description of Artificial Sequence: Synthetic oligonucleotide
ataggccacgtcctgcacc

SEQ ID NO: 1943 - DNA, 19 bp, Artificial Sequence
  Description of Artificial Sequence: Synthetic oligonucleotide
cataggccacgtcctgcac

SEQ ID NO: 1944 - DNA, 19 bp, Artificial Sequence
  Description of Artificial Sequence: Synthetic oligonucleotide
tcataggccacgtcctgca

SEQ ID NO: 1945 - DNA, 19 bp, Artificial Sequence
  Description of Artificial Sequence: Synthetic oligonucleotide
gtcataggccacgtcctgc

SEQ ID NO: 1946 - DNA, 19 bp, Artificial Sequence
  Description of Artificial Sequence: Synthetic oligonucleotide
ggtcataggccacgtcctg

SEQ ID NO: 1947 - DNA, 19 bp, Artificial Sequence
  Description of Artificial Sequence: Synthetic oligonucleotide
aggtcataggccacgtcct

SEQ ID NO: 1948 - DNA, 19 bp, Artificial Sequence
  Description of Artificial Sequence: Synthetic oligonucleotide
gaggtcataggccacgtcc

SEQ ID NO: 1949 - DNA, 19 bp, Artificial Sequence
  Description of Artificial Sequence: Synthetic oligonucleotide
agaggtcataggccacgtc

SEQ ID NO: 1950 - DNA, 19 bp, Artificial Sequence
  Description of Artificial Sequence: Synthetic oligonucleotide
cagaggtcataggccacgt

SEQ ID NO: 1951 - DNA, 19 bp, Artificial Sequence
  Description of Artificial Sequence: Synthetic oligonucleotide
ccagaggtcataggccacg

SEQ ID NO: 1952 - DNA, 19 bp, Artificial Sequence
  Description of Artificial Sequence: Synthetic oligonucleotide
gccagaggtcataggccac

SEQ ID NO: 1953 - DNA, 19 bp, Artificial Sequence
  Description of Artificial Sequence: Synthetic oligonucleotide
cgccagaggtcataggcca

SEQ ID NO: 1954 - DNA, 19 bp, Artificial Sequence
  Description of Artificial Sequence: Synthetic oligonucleotide
tcgccagaggtcataggcc

SEQ ID NO: 1955 - DNA, 19 bp, Artificial Sequence
  Description of Artificial Sequence: Synthetic oligonucleotide
ctcgccagaggtcataggc

SEQ ID NO: 1956 - DNA, 19 bp, Artificial Sequence
  Description of Artificial Sequence: Synthetic oligonucleotide
tctcgccagaggtcatagg

SEQ ID NO: 1957 - DNA, 19 bp, Artificial Sequence
  Description of Artificial Sequence: Synthetic oligonucleotide
ctctcgccagaggtcatag

SEQ ID NO: 1958 - DNA, 19 bp, Artificial Sequence
  Description of Artificial Sequence: Synthetic oligonucleotide
cctctcgccagaggtcata

SEQ ID NO: 1959 - DNA, 19 bp, Artificial Sequence
  Description of Artificial Sequence: Synthetic oligonucleotide
tcctctcgccagaggtcat

SEQ ID NO: 1960 - DNA, 19 bp, Artificial Sequence
  Description of Artificial Sequence: Synthetic oligonucleotide
ctcctctcgccagaggtca

SEQ ID NO: 1961 - DNA, 19 bp, Artificial Sequence
  Description of Artificial Sequence: Synthetic oligonucleotide
tctcctctcgccagaggtc

SEQ ID NO: 1962 - DNA, 19 bp, Artificial Sequence
  Description of Artificial Sequence: Synthetic oligonucleotide
ttctcctctcgccagaggt

SEQ ID NO: 1963 - DNA, 19 bp, Artificial Sequence
  Description of Artificial Sequence: Synthetic oligonucleotide
gttctcctctcgccagagg

SEQ ID NO: 1964 - DNA, 19 bp, Artificial Sequence
  Description of Artificial Sequence: Synthetic oligonucleotide
cgttctcctctcgccagag

SEQ ID NO: 1965 - DNA, 19 bp, Artificial Sequence
  Description of Artificial Sequence: Synthetic oligonucleotide
ccgttctcctctcgccaga

SEQ ID NO: 1966 - DNA, 19 bp, Artificial Sequence
  Description of Artificial Sequence: Synthetic oligonucleotide
gccgttctcctctcgccag

SEQ ID NO: 1967 - DNA, 19 bp, Artificial Sequence
  Description of Artificial Sequence: Synthetic oligonucleotide
agccgttctcctctcgcca

SEQ ID NO: 1968 - DNA, 19 bp, Artificial Sequence
  Description of Artificial Sequence: Synthetic oligonucleotide
cagccgttctcctctcgcc

SEQ ID NO: 1969 - DNA, 19 bp, Artificial Sequence
  Description of Artificial Sequence: Synthetic oligonucleotide
acagccgttctcctctcgc

SEQ ID NO: 1970 - DNA, 19 bp, Artificial Sequence
  Description of Artificial Sequence: Synthetic oligonucleotide
cacagccgttctcctctcg

SEQ ID NO: 1971 - DNA, 19 bp, Artificial Sequence
  Description of Artificial Sequence: Synthetic oligonucleotide
tcacagccgttctcctctc

SEQ ID NO: 1972 - DNA, 19 bp, Artificial Sequence
  Description of Artificial Sequence: Synthetic oligonucleotide
ctcacagccgttctcctct

SEQ ID NO: 1973 - DNA, 19 bp, Artificial Sequence
  Description of Artificial Sequence: Synthetic oligonucleotide
actcacagccgttctcctc

SEQ ID NO: 1974 - DNA, 19 bp, Artificial Sequence
  Description of Artificial Sequence: Synthetic oligonucleotide
cactcacagccgttctcct

SEQ ID NO: 1975 - DNA, 19 bp, Artificial Sequence
  Description of Artificial Sequence: Synthetic oligonucleotide
gcactcacagccgttctcc

SEQ ID NO: 1976 - DNA, 19 bp, Artificial Sequence
  Description of Artificial Sequence: Synthetic oligonucleotide
tgcactcacagccgttctc

SEQ ID NO: 1977 - DNA, 19 bp, Artificial Sequence
  Description of Artificial Sequence: Synthetic oligonucleotide
gtgcactcacagccgttct

SEQ ID NO: 1978 - DNA, 19 bp, Artificial Sequence
  Description of Artificial Sequence: Synthetic oligonucleotide
ggtgcactcacagccgttc

SEQ ID NO: 1979 - DNA, 19 bp, Artificial Sequence
  Description of Artificial Sequence: Synthetic oligonucleotide
tggtgcactcacagccgtt

SEQ ID NO: 1980 - DNA, 19 bp, Artificial Sequence
  Description of Artificial Sequence: Synthetic oligonucleotide
acggctgtgagtgcaccaa

SEQ ID NO: 1981 - DNA, 19 bp, Artificial Sequence
  Description of Artificial Sequence: Synthetic oligonucleotide
cggctgtgagtgcaccaag

SEQ ID NO: 1982 - DNA, 19 bp, Artificial Sequence
  Description of Artificial Sequence: Synthetic oligonucleotide
ggctgtgagtgcaccaagg

SEQ ID NO: 1983 - DNA, 19 bp, Artificial Sequence
  Description of Artificial Sequence: Synthetic oligonucleotide
gctgtgagtgcaccaaggc

SEQ ID NO: 1984 - DNA, 19 bp, Artificial Sequence
  Description of Artificial Sequence: Synthetic oligonucleotide
ctgtgagtgcaccaaggcc

SEQ ID NO: 1985 - DNA, 19 bp, Artificial Sequence
  Description of Artificial Sequence: Synthetic oligonucleotide
tgtgagtgcaccaaggccg

SEQ ID NO: 1986 - DNA, 19 bp, Artificial Sequence
  Description of Artificial Sequence: Synthetic oligonucleotide
gtgagtgcaccaaggccgt

SEQ ID NO: 1987 - DNA, 19 bp, Artificial Sequence
  Description of Artificial Sequence: Synthetic oligonucleotide
tgagtgcaccaaggccgtg

SEQ ID NO: 1988 - DNA, 19 bp, Artificial Sequence
  Description of Artificial Sequence: Synthetic oligonucleotide
gagtgcaccaaggccgtga

SEQ ID NO: 1989 - DNA, 19 bp, Artificial Sequence
  Description of Artificial Sequence: Synthetic oligonucleotide
agtgcaccaaggccgtgaa

SEQ ID NO: 1990 - DNA, 19 bp, Artificial Sequence
  Description of Artificial Sequence: Synthetic oligonucleotide
gtgcaccaaggccgtgaac

SEQ ID NO: 1991 - DNA, 19 bp, Artificial Sequence
  Description of Artificial Sequence: Synthetic oligonucleotide
tgcaccaaggccgtgaact

SEQ ID NO: 1992 - DNA, 19 bp, Artificial Sequence
  Description of Artificial Sequence: Synthetic oligonucleotide
gcaccaaggccgtgaactt

SEQ ID NO: 1993 - DNA, 19 bp, Artificial Sequence
  Description of Artificial Sequence: Synthetic oligonucleotide
caccaaggccgtgaacttt

SEQ ID NO: 1994 - DNA, 19 bp, Artificial Sequence
  Description of Artificial Sequence: Synthetic oligonucleotide
accaaggccgtgaactttg

SEQ ID NO: 1995 - DNA, 19 bp, Artificial Sequence
  Description of Artificial Sequence: Synthetic oligonucleotide
ccaaggccgtgaactttgc

SEQ ID NO: 1996 - DNA, 19 bp, Artificial Sequence
  Description of Artificial Sequence: Synthetic oligonucleotide
caaggccgtgaactttgcc

SEQ ID NO: 1997 - DNA, 19 bp, Artificial Sequence
  Description of Artificial Sequence: Synthetic oligonucleotide
aaggccgtgaactttgcca

SEQ ID NO: 1998 - DNA, 19 bp, Artificial Sequence
  Description of Artificial Sequence: Synthetic oligonucleotide
aggccgtgaactttgccat

SEQ ID NO: 1999 - DNA, 19 bp, Artificial Sequence
  Description of Artificial Sequence: Synthetic oligonucleotide
ggccgtgaactttgccatg

SEQ ID NO: 2000 - DNA, 19 bp, Artificial Sequence
  Description of Artificial Sequence: Synthetic oligonucleotide
gccgtgaactttgccatgc

SEQ ID NO: 2001 - DNA, 19 bp, Artificial Sequence
  Description of Artificial Sequence: Synthetic oligonucleotide
ccgtgaactttgccatgca

SEQ ID NO: 2002 - DNA, 19 bp, Artificial Sequence
  Description of Artificial Sequence: Synthetic oligonucleotide
cgtgaactttgccatgcat

SEQ ID NO: 2003 - DNA, 19 bp, Artificial Sequence
  Description of Artificial Sequence: Synthetic oligonucleotide
gtgaactttgccatgcatg

SEQ ID NO: 2004 - DNA, 19 bp, Artificial Sequence
  Description of Artificial Sequence: Synthetic oligonucleotide
tgaactttgccatgcatga

SEQ ID NO: 2005 - DNA, 19 bp, Artificial Sequence
  Description of Artificial Sequence: Synthetic oligonucleotide
gaactttgccatgcatgaa

SEQ ID NO: 2006 - DNA, 19 bp, Artificial Sequence
  Description of Artificial Sequence: Synthetic oligonucleotide
aactttgccatgcatgaac

SEQ ID NO: 2007 - DNA, 19 bp, Artificial Sequence
  Description of Artificial Sequence: Synthetic oligonucleotide
actttgccatgcatgaact

SEQ ID NO: 2008 - DNA, 19 bp, Artificial Sequence
  Description of Artificial Sequence: Synthetic oligonucleotide
ctttgccatgcatgaactt

SEQ ID NO: 2009 - DNA, 19 bp, Artificial Sequence
  Description of Artificial Sequence: Synthetic oligonucleotide
tttgccatgcatgaacttc

SEQ ID NO: 2010 - DNA, 19 bp, Artificial Sequence
  Description of Artificial Sequence: Synthetic oligonucleotide
ttgccatgcatgaacttca

SEQ ID NO: 2011 - DNA, 19 bp, Artificial Sequence
  Description of Artificial Sequence: Synthetic oligonucleotide
tgccatgcatgaacttcag

SEQ ID NO: 2012 - DNA, 19 bp, Artificial Sequence
  Description of Artificial Sequence: Synthetic oligonucleotide
gccatgcatgaacttcagc

SEQ ID NO: 2013 - DNA, 19 bp, Artificial Sequence
  Description of Artificial Sequence: Synthetic oligonucleotide
ccatgcatgaacttcagct

SEQ ID NO: 2014 - DNA, 19 bp, Artificial Sequence
  Description of Artificial Sequence: Synthetic oligonucleotide
catgcatgaacttcagctc

SEQ ID NO: 2015 - DNA, 19 bp, Artificial Sequence
  Description of Artificial Sequence: Synthetic oligonucleotide
atgcatgaacttcagctca

SEQ ID NO: 2016 - DNA, 19 bp, Artificial Sequence
  Description of Artificial Sequence: Synthetic oligonucleotide
tgcatgaacttcagctcat

SEQ ID NO: 2017 - DNA, 19 bp, Artificial Sequence
  Description of Artificial Sequence: Synthetic oligonucleotide
gcatgaacttcagctcatc

SEQ ID NO: 2018 - DNA, 19 bp, Artificial Sequence
  Description of Artificial Sequence: Synthetic oligonucleotide
catgaacttcagctcatcc

SEQ ID NO: 2019 - DNA, 19 bp, Artificial Sequence
  Description of Artificial Sequence: Synthetic oligonucleotide
atgaacttcagctcatccg

SEQ ID NO: 2020 - DNA, 19 bp, Artificial Sequence
  Description of Artificial Sequence: Synthetic oligonucleotide
tgaacttcagctcatccgg

SEQ ID NO: 2021 - DNA, 19 bp, Artificial Sequence
  Description of Artificial Sequence: Synthetic oligonucleotide
gaacttcagctcatccggg

SEQ ID NO: 2022 - DNA, 19 bp, Artificial Sequence
  Description of Artificial Sequence: Synthetic oligonucleotide
aacttcagctcatccgggt

SEQ ID NO: 2023 - DNA, 19 bp, Artificial Sequence
  Description of Artificial Sequence: Synthetic oligonucleotide
acttcagctcatccgggtg

SEQ ID NO: 2024 - DNA, 19 bp, Artificial Sequence
  Description of Artificial Sequence: Synthetic oligonucleotide
cttcagctcatccgggtgg

SEQ ID NO: 2025 - DNA, 19 bp, Artificial Sequence
  Description of Artificial Sequence: Synthetic oligonucleotide
ttcagctcatccgggtgga

SEQ ID NO: 2026 - DNA, 19 bp, Artificial Sequence
  Description of Artificial Sequence: Synthetic oligonucleotide
tcagctcatccgggtggag

SEQ ID NO: 2027 - DNA, 19 bp, Artificial Sequence
  Description of Artificial Sequence: Synthetic oligonucleotide
cagctcatccgggtggaga

SEQ ID NO: 2028 - DNA, 19 bp, Artificial Sequence
  Description of Artificial Sequence: Synthetic oligonucleotide
agctcatccgggtggagaa

SEQ ID NO: 2029 - DNA, 19 bp, Artificial Sequence
  Description of Artificial Sequence: Synthetic oligonucleotide
gctcatccgggtggagaag

SEQ ID NO: 2030 - DNA, 19 bp, Artificial Sequence
  Description of Artificial Sequence: Synthetic oligonucleotide
ctcatccgggtggagaagc

SEQ ID NO: 2031 - DNA, 19 bp, Artificial Sequence
  Description of Artificial Sequence: Synthetic oligonucleotide
tcatccgggtggagaagca

SEQ ID NO: 2032 - DNA, 19 bp, Artificial Sequence
  Description of Artificial Sequence: Synthetic oligonucleotide
catccgggtggagaagcag

SEQ ID NO: 2033 - DNA, 19 bp, Artificial Sequence
  Description of Artificial Sequence: Synthetic oligonucleotide
atccgggtggagaagcagt

SEQ ID NO: 2034 - DNA, 19 bp, Artificial Sequence
  Description of Artificial Sequence: Synthetic oligonucleotide
tccgggtggagaagcagta

SEQ ID NO: 2035 - DNA, 19 bp, Artificial Sequence
  Description of Artificial Sequence: Synthetic oligonucleotide
ccgggtggagaagcagtac

SEQ ID NO: 2036 - DNA, 19 bp, Artificial Sequence
  Description of Artificial Sequence: Synthetic oligonucleotide
cgggtggagaagcagtacc

SEQ ID NO: 2037 - DNA, 19 bp, Artificial Sequence
  Description of Artificial Sequence: Synthetic oligonucleotide
gggtggagaagcagtacct

SEQ ID NO: 2038 - DNA, 19 bp, Artificial Sequence
  Description of Artificial Sequence: Synthetic oligonucleotide
ggtggagaagcagtacctt

SEQ ID NO: 2039 - DNA, 19 bp, Artificial Sequence
  Description of Artificial Sequence: Synthetic oligonucleotide
gtggagaagcagtaccttc

SEQ ID NO: 2040 - DNA, 19 bp, Artificial Sequence
  Description of Artificial Sequence: Synthetic oligonucleotide
tggagaagcagtaccttca

SEQ ID NO: 2041 - DNA, 19 bp, Artificial Sequence
  Description of Artificial Sequence: Synthetic oligonucleotide
ggagaagcagtaccttcac

SEQ ID NO: 2042 - DNA, 19 bp, Artificial Sequence
  Description of Artificial Sequence: Synthetic oligonucleotide
gagaagcagtaccttcacc

SEQ ID NO: 2043 - DNA, 19 bp, Artificial Sequence
  Description of Artificial Sequence: Synthetic oligonucleotide
agaagcagtaccttcacca

SEQ ID NO: 2044 - DNA, 19 bp, Artificial Sequence
  Description of Artificial Sequence: Synthetic oligonucleotide
gaagcagtaccttcaccac

SEQ ID NO: 2045 - DNA, 19 bp, Artificial Sequence
  Description of Artificial Sequence: Synthetic oligonucleotide
aagcagtaccttcaccaca

SEQ ID NO: 2046 - DNA, 19 bp, Artificial Sequence
  Description of Artificial Sequence: Synthetic oligonucleotide
agcagtaccttcaccacaa

SEQ ID NO: 2047 - DNA, 19 bp, Artificial Sequence
  Description of Artificial Sequence: Synthetic oligonucleotide
gcagtaccttcaccacaac

SEQ ID NO: 2048 - DNA, 19 bp, Artificial Sequence
  Description of Artificial Sequence: Synthetic oligonucleotide
cagtaccttcaccacaacc

SEQ ID NO: 2049 - DNA, 19 bp, Artificial Sequence
  Description of Artificial Sequence: Synthetic oligonucleotide
agtaccttcaccacaacct

SEQ ID NO: 2050 - DNA, 19 bp, Artificial Sequence
  Description of Artificial Sequence: Synthetic oligonucleotide
gtaccttcaccacaacctc

SEQ ID NO: 2051 - DNA, 19 bp, Artificial Sequence
  Description of Artificial Sequence: Synthetic oligonucleotide
taccttcaccacaacctcg

SEQ ID NO: 2052 - DNA, 19 bp, Artificial Sequence
  Description of Artificial Sequence: Synthetic oligonucleotide
accttcaccacaacctcga

SEQ ID NO: 2053 - DNA, 19 bp, Artificial Sequence
  Description of Artificial Sequence: Synthetic oligonucleotide
ccttcaccacaacctcgac

SEQ ID NO: 2054 - DNA, 19 bp, Artificial Sequence
  Description of Artificial Sequence: Synthetic oligonucleotide
cttcaccacaacctcgacc

SEQ ID NO: 2055 - DNA, 19 bp, Artificial Sequence
  Description of Artificial Sequence: Synthetic oligonucleotide
ttcaccacaacctcgacca

SEQ ID NO: 2056 - DNA, 19 bp, Artificial Sequence
  Description of Artificial Sequence: Synthetic oligonucleotide
tcaccacaacctcgaccac

SEQ ID NO: 2057 - DNA, 19 bp, Artificial Sequence
  Description of Artificial Sequence: Synthetic oligonucleotide
caccacaacctcgaccacc

SEQ ID NO: 2058 - DNA, 19 bp, Artificial Sequence
  Description of Artificial Sequence: Synthetic oligonucleotide
accacaacctcgaccacct

SEQ ID NO: 2059 - DNA, 19 bp, Artificial Sequence
  Description of Artificial Sequence: Synthetic oligonucleotide
ccacaacctcgaccacctg

SEQ ID NO: 2060 - DNA, 19 bp, Artificial Sequence
  Description of Artificial Sequence: Synthetic oligonucleotide
cacaacctcgaccacctgg

SEQ ID NO: 2061 - DNA, 19 bp, Artificial Sequence
  Description of Artificial Sequence: Synthetic oligonucleotide
acaacctcgaccacctggt

SEQ ID NO: 2062 - DNA, 19 bp, Artificial Sequence
  Description of Artificial Sequence: Synthetic oligonucleotide
caacctcgaccacctggtc

SEQ ID NO: 2063 - DNA, 19 bp, Artificial Sequence
  Description of Artificial Sequence: Synthetic oligonucleotide
aacctcgaccacctggtcg

SEQ ID NO: 2064 - DNA, 19 bp, Artificial Sequence
  Description of Artificial Sequence: Synthetic oligonucleotide
acctcgaccacctggtcga

SEQ ID NO: 2065 - DNA, 19 bp, Artificial Sequence
  Description of Artificial Sequence: Synthetic oligonucleotide
cctcgaccacctggtcgag

SEQ ID NO: 2066 - DNA, 19 bp, Artificial Sequence
  Description of Artificial Sequence: Synthetic oligonucleotide
ctcgaccacctggtcgagg

SEQ ID NO: 2067 - DNA, 19 bp, Artificial Sequence
  Description of Artificial Sequence: Synthetic oligonucleotide
tcgaccacctggtcgagga

SEQ ID NO: 2068 - DNA, 19 bp, Artificial Sequence
  Description of Artificial Sequence: Synthetic oligonucleotide
cgaccacctggtcgaggag

SEQ ID NO: 2069 - DNA, 19 bp, Artificial Sequence
  Description of Artificial Sequence: Synthetic oligonucleotide
gaccacctggtcgaggagc

SEQ ID NO: 2070 - DNA, 19 bp, Artificial Sequence
  Description of Artificial Sequence: Synthetic oligonucleotide
accacctggtcgaggagct

SEQ ID NO: 2071 - DNA, 19 bp, Artificial Sequence
  Description of Artificial Sequence: Synthetic oligonucleotide
ccacctggtcgaggagctc

SEQ ID NO: 2072 - DNA, 19 bp, Artificial Sequence
  Description of Artificial Sequence: Synthetic oligonucleotide
cacctggtcgaggagctct

SEQ ID NO: 2073 - DNA, 19 bp, Artificial Sequence
  Description of Artificial Sequence: Synthetic oligonucleotide
acctggtcgaggagctctt

SEQ ID NO: 2074 - DNA, 19 bp, Artificial Sequence
  Description of Artificial Sequence: Synthetic oligonucleotide
cctggtcgaggagctcttc

SEQ ID NO: 2075 - DNA, 19 bp, Artificial Sequence
  Description of Artificial Sequence: Synthetic oligonucleotide
ctggtcgaggagctcttcc

SEQ ID NO: 2076 - DNA, 19 bp, Artificial Sequence
  Description of Artificial Sequence: Synthetic oligonucleotide
tggtcgaggagctcttcct

SEQ ID NO: 2077 - DNA, 19 bp, Artificial Sequence
  Description of Artificial Sequence: Synthetic oligonucleotide
ggtcgaggagctcttcctt

SEQ ID NO: 2078 - DNA, 19 bp, Artificial Sequence
  Description of Artificial Sequence: Synthetic oligonucleotide
gtcgaggagctcttccttg

SEQ ID NO: 2079 - DNA, 19 bp, Artificial Sequence
  Description of Artificial Sequence: Synthetic oligonucleotide
tcgaggagctcttccttgg

SEQ ID NO: 2080 - DNA, 19 bp, Artificial Sequence
  Description of Artificial Sequence: Synthetic oligonucleotide
cgaggagctcttccttggt

SEQ ID NO: 2081 - DNA, 19 bp, Artificial Sequence
  Description of Artificial Sequence: Synthetic oligonucleotide
gaggagctcttccttggtg

SEQ ID NO: 2082 - DNA, 19 bp, Artificial Sequence
  Description of Artificial Sequence: Synthetic oligonucleotide
aggagctcttccttggtga

SEQ ID NO: 2083 - DNA, 19 bp, Artificial Sequence
  Description of Artificial Sequence: Synthetic oligonucleotide
ggagctcttccttggtgac

SEQ ID NO: 2084 - DNA, 19 bp, Artificial Sequence
  Description of Artificial Sequence: Synthetic oligonucleotide
gagctcttccttggtgaca

SEQ ID NO: 2085 - DNA, 19 bp, Artificial Sequence
  Description of Artificial Sequence: Synthetic oligonucleotide
agctcttccttggtgacat

SEQ ID NO: 2086 - DNA, 19 bp, Artificial Sequence
  Description of Artificial Sequence: Synthetic oligonucleotide
gctcttccttggtgacatt

SEQ ID NO: 2087 - DNA, 19 bp, Artificial Sequence
  Description of Artificial Sequence: Synthetic oligonucleotide
ctcttccttggtgacattc

SEQ ID NO: 2088 - DNA, 19 bp, Artificial Sequence
  Description of Artificial Sequence: Synthetic oligonucleotide
tcttccttggtgacattca

SEQ ID NO: 2089 - DNA, 19 bp, Artificial Sequence
  Description of Artificial Sequence: Synthetic oligonucleotide
cttccttggtgacattcac

SEQ ID NO: 2090 - DNA, 19 bp, Artificial Sequence
  Description of Artificial Sequence: Synthetic oligonucleotide
ttccttggtgacattcaca

SEQ ID NO: 2091 - DNA, 19 bp, Artificial Sequence
  Description of Artificial Sequence: Synthetic oligonucleotide
tccttggtgacattcacac

SEQ ID NO: 2092 - DNA, 19 bp, Artificial Sequence
  Description of Artificial Sequence: Synthetic oligonucleotide
ccttggtgacattcacact

SEQ ID NO: 2093 - DNA, 19 bp, Artificial Sequence
  Description of Artificial Sequence: Synthetic oligonucleotide
cttggtgacattcacactg

SEQ ID NO: 2094 - DNA, 19 bp, Artificial Sequence
  Description of Artificial Sequence: Synthetic oligonucleotide
ttggtgacattcacactga

SEQ ID NO: 2095 - DNA, 19 bp, Artificial Sequence
  Description of Artificial Sequence: Synthetic oligonucleotide
tggtgacattcacactgat

SEQ ID NO: 2096 - DNA, 19 bp, Artificial Sequence
  Description of Artificial Sequence: Synthetic oligonucleotide
ggtgacattcacactgatg

SEQ ID NO: 2097 - DNA, 19 bp, Artificial Sequence
  Description of Artificial Sequence: Synthetic oligonucleotide
gtgacattcacactgatgc

SEQ ID NO: 2098 - DNA, 19 bp, Artificial Sequence
  Description of Artificial Sequence: Synthetic oligonucleotide
tgacattcacactgatgcc

SEQ ID NO: 2099 - DNA, 19 bp, Artificial Sequence
  Description of Artificial Sequence: Synthetic oligonucleotide
gacattcacactgatgcca

SEQ ID NO: 2100 - DNA, 19 bp, Artificial Sequence
  Description of Artificial Sequence: Synthetic oligonucleotide
acattcacactgatgccac

SEQ ID NO: 2101 - DNA, 19 bp, Artificial Sequence
  Description of Artificial Sequence: Synthetic oligonucleotide
cattcacactgatgccacc

SEQ ID NO: 2102 - DNA, 19 bp, Artificial Sequence
  Description of Artificial Sequence: Synthetic oligonucleotide
attcacactgatgccaccc

SEQ ID NO: 2103 - DNA, 19 bp, Artificial Sequence
  Description of Artificial Sequence: Synthetic oligonucleotide
ttcacactgatgccaccca

SEQ ID NO: 2104 - DNA, 19 bp, Artificial Sequence
  Description of Artificial Sequence: Synthetic oligonucleotide
tcacactgatgccacccag

SEQ ID NO: 2105 - DNA, 19 bp, Artificial Sequence
  Description of Artificial Sequence: Synthetic oligonucleotide
cacactgatgccacccaga

SEQ ID NO: 2106 - DNA, 19 bp, Artificial Sequence
  Description of Artificial Sequence: Synthetic oligonucleotide
acactgatgccacccagag

SEQ ID NO: 2107 - DNA, 19 bp, Artificial Sequence
  Description of Artificial Sequence: Synthetic oligonucleotide
cactgatgccacccagagg

SEQ ID NO: 2108 - DNA, 19 bp, Artificial Sequence
  Description of Artificial Sequence: Synthetic oligonucleotide
actgatgccacccagagga

SEQ ID NO: 2109 - DNA, 19 bp, Artificial Sequence
  Description of Artificial Sequence: Synthetic oligonucleotide
ctgatgccacccagaggat

SEQ ID NO: 2110 - DNA, 19 bp, Artificial Sequence
  Description of Artificial Sequence: Synthetic oligonucleotide
tgatgccacccagaggatg

SEQ ID NO: 2111 - DNA, 19 bp, Artificial Sequence
  Description of Artificial Sequence: Synthetic oligonucleotide
gatgccacccagaggatgt

SEQ ID NO: 2112 - DNA, 19 bp, Artificial Sequence
  Description of Artificial Sequence: Synthetic oligonucleotide
atgccacccagaggatgtt

SEQ ID NO: 2113 - DNA, 19 bp, Artificial Sequence
  Description of Artificial Sequence: Synthetic oligonucleotide
tgccacccagaggatgttc

SEQ ID NO: 2114 - DNA, 19 bp, Artificial Sequence
  Description of Artificial Sequence: Synthetic oligonucleotide
gccacccagaggatgttct

SEQ ID NO: 2115 - DNA, 19 bp, Artificial Sequence
  Description of Artificial Sequence: Synthetic oligonucleotide
ccacccagaggatgttcta

SEQ ID NO: 2116 - DNA, 19 bp, Artificial Sequence
  Description of Artificial Sequence: Synthetic oligonucleotide
cacccagaggatgttctac

SEQ ID NO: 2117 - DNA, 19 bp, Artificial Sequence
  Description of Artificial Sequence: Synthetic oligonucleotide
acccagaggatgttctacc

SEQ ID NO: 2118 - DNA, 19 bp, Artificial Sequence
  Description of Artificial Sequence: Synthetic oligonucleotide
cccagaggatgttctaccg

SEQ ID NO: 2119 - DNA, 19 bp, Artificial Sequence
  Description of Artificial Sequence: Synthetic oligonucleotide
ccagaggatgttctaccgg

SEQ ID NO: 2120 - DNA, 19 bp, Artificial Sequence
  Description of Artificial Sequence: Synthetic oligonucleotide
cagaggatgttctaccggc

SEQ ID NO: 2121 - DNA, 19 bp, Artificial Sequence
  Description of Artificial Sequence: Synthetic oligonucleotide
agaggatgttctaccggcc

SEQ ID NO: 2122 - DNA, 19 bp, Artificial Sequence
  Description of Artificial Sequence: Synthetic oligonucleotide
gaggatgttctaccggccc

SEQ ID NO: 2123 - DNA, 19 bp, Artificial Sequence
  Description of Artificial Sequence: Synthetic oligonucleotide
aggatgttctaccggccct

SEQ ID NO: 2124 - DNA, 19 bp, Artificial Sequence
  Description of Artificial Sequence: Synthetic oligonucleotide
ggatgttctaccggccctc

SEQ ID NO: 2125 - DNA, 19 bp, Artificial Sequence
  Description of Artificial Sequence: Synthetic oligonucleotide
gatgttctaccggccctcc

SEQ ID NO: 2126 - DNA, 19 bp, Artificial Sequence
  Description of Artificial Sequence: Synthetic oligonucleotide
atgttctaccggccctcca

SEQ ID NO: 2127 - DNA, 19 bp, Artificial Sequence
  Description of Artificial Sequence: Synthetic oligonucleotide
tgttctaccggccctccag

SEQ ID NO: 2128 - DNA, 19 bp, Artificial Sequence
  Description of Artificial Sequence: Synthetic oligonucleotide
gttctaccggccctccagt

SEQ ID NO: 2129 - DNA, 19 bp, Artificial Sequence
  Description of Artificial Sequence: Synthetic oligonucleotide
ttctaccggccctccagtt

SEQ ID NO: 2130 - DNA, 19 bp, Artificial Sequence
  Description of Artificial Sequence: Synthetic oligonucleotide
tctaccggccctccagtta

SEQ ID NO: 2131 - DNA, 19 bp, Artificial Sequence
  Description of Artificial Sequence: Synthetic oligonucleotide
ctaccggccctccagttac

SEQ ID NO: 2132 - DNA, 19 bp, Artificial Sequence
  Description of Artificial Sequence: Synthetic oligonucleotide
taccggccctccagttacc

SEQ ID NO: 2133 - DNA, 19 bp, Artificial Sequence
  Description of Artificial Sequence: Synthetic oligonucleotide
accggccctccagttacca

SEQ ID NO: 2134 - DNA, 19 bp, Artificial Sequence
  Description of Artificial Sequence: Synthetic oligonucleotide
ccggccctccagttaccag

SEQ ID NO: 2135 - DNA, 19 bp, Artificial Sequence
  Description of Artificial Sequence: Synthetic oligonucleotide
cggccctccagttaccagc

SEQ ID NO: 2136 - DNA, 19 bp, Artificial Sequence
  Description of Artificial Sequence: Synthetic oligonucleotide
ggccctccagttaccagcc

SEQ ID NO: 2137 - DNA, 19 bp, Artificial Sequence
  Description of Artificial Sequence: Synthetic oligonucleotide
gccctccagttaccagccc

SEQ ID NO: 2138 - DNA, 19 bp, Artificial Sequence
  Description of Artificial Sequence: Synthetic oligonucleotide
ccctccagttaccagcccc

SEQ ID NO: 2139 - DNA, 19 bp, Artificial Sequence
  Description of Artificial Sequence: Synthetic oligonucleotide
cctccagttaccagccccc

SEQ ID NO: 2140 - DNA, 19 bp, Artificial Sequence
  Description of Artificial Sequence: Synthetic oligonucleotide
ctccagttaccagccccct

SEQ ID NO: 2141 - DNA, 19 bp, Artificial Sequence
  Description of Artificial Sequence: Synthetic oligonucleotide
tccagttaccagccccctc

SEQ ID NO: 2142 - DNA, 19 bp, Artificial Sequence
  Description of Artificial Sequence: Synthetic oligonucleotide
ccagttaccagccccctct

SEQ ID NO: 2143 - DNA, 19 bp, Artificial Sequence
  Description of Artificial Sequence: Synthetic oligonucleotide
cagttaccagccccctctg

SEQ ID NO: 2144 - DNA, 19 bp, Artificial Sequence
  Description of Artificial Sequence: Synthetic oligonucleotide
agttaccagccccctctgc

SEQ ID NO: 2145 - DNA, 19 bp, Artificial Sequence
  Description of Artificial Sequence: Synthetic oligonucleotide
gttaccagccccctctgca

SEQ ID NO: 2146 - DNA, 19 bp, Artificial Sequence
  Description of Artificial Sequence: Synthetic oligonucleotide
ttaccagccccctctgcag

SEQ ID NO: 2147 - DNA, 19 bp, Artificial Sequence
  Description of Artificial Sequence: Synthetic oligonucleotide
taccagccccctctgcaga

SEQ ID NO: 2148 - DNA, 19 bp, Artificial Sequence
  Description of Artificial Sequence: Synthetic oligonucleotide
accagccccctctgcagaa

SEQ ID NO: 2149 - DNA, 19 bp, Artificial Sequence
  Description of Artificial Sequence: Synthetic oligonucleotide
ccagccccctctgcagaat

SEQ ID NO: 2150 - DNA, 19 bp, Artificial Sequence
  Description of Artificial Sequence: Synthetic oligonucleotide
cagccccctctgcagaatg

SEQ ID NO: 2151 - DNA, 19 bp, Artificial Sequence
  Description of Artificial Sequence: Synthetic oligonucleotide
agccccctctgcagaatgc

SEQ ID NO: 2152 - DNA, 19 bp, Artificial Sequence
  Description of Artificial Sequence: Synthetic oligonucleotide
gccccctctgcagaatgcc

SEQ ID NO: 2153 - DNA, 19 bp, Artificial Sequence
  Description of Artificial Sequence: Synthetic oligonucleotide
ccccctctgcagaatgcca

SEQ ID NO: 2154 - DNA, 19 bp, Artificial Sequence
  Description of Artificial Sequence: Synthetic oligonucleotide
cccctctgcagaatgccaa

SEQ ID NO: 2155 - DNA, 19 bp, Artificial Sequence
  Description of Artificial Sequence: Synthetic oligonucleotide
ccctctgcagaatgccaag

SEQ ID NO: 2156 - DNA, 19 bp, Artificial Sequence
  Description of Artificial Sequence: Synthetic oligonucleotide
cctctgcagaatgccaaga

SEQ ID NO: 2157 - DNA, 19 bp, Artificial Sequence
  Description of Artificial Sequence: Synthetic oligonucleotide
ctctgcagaatgccaagaa

SEQ ID NO: 2158 - DNA, 19 bp, Artificial Sequence
  Description of Artificial Sequence: Synthetic oligonucleotide
tctgcagaatgccaagaac

SEQ ID NO: 2159 - DNA, 19 bp, Artificial Sequence
  Description of Artificial Sequence: Synthetic oligonucleotide
ctgcagaatgccaagaacc

SEQ ID NO: 2160 - DNA, 19 bp, Artificial Sequence
  Description of Artificial Sequence: Synthetic oligonucleotide
tgcagaatgccaagaacca

SEQ ID NO: 2161 - DNA, 19 bp, Artificial Sequence
  Description of Artificial Sequence: Synthetic oligonucleotide
gcagaatgccaagaaccac

SEQ ID NO: 2162 - DNA, 19 bp, Artificial Sequence
  Description of Artificial Sequence: Synthetic oligonucleotide
cagaatgccaagaaccacg

SEQ ID NO: 2163 - DNA, 19 bp, Artificial Sequence
  Description of Artificial Sequence: Synthetic oligonucleotide
agaatgccaagaaccacga

SEQ ID NO: 2164 - DNA, 19 bp, Artificial Sequence
  Description of Artificial Sequence: Synthetic oligonucleotide
gaatgccaagaaccacgac

SEQ ID NO: 2165 - DNA, 19 bp, Artificial Sequence
  Description of Artificial Sequence: Synthetic oligonucleotide
aatgccaagaaccacgacc

SEQ ID NO: 2166 - DNA, 19 bp, Artificial Sequence
  Description of Artificial Sequence: Synthetic oligonucleotide
atgccaagaaccacgacca

SEQ ID NO: 2167 - DNA, 19 bp, Artificial Sequence
  Description of Artificial Sequence: Synthetic oligonucleotide
tgccaagaaccacgaccat

SEQ ID NO: 2168 - DNA, 19 bp, Artificial Sequence
  Description of Artificial Sequence: Synthetic oligonucleotide
gccaagaaccacgaccatg

SEQ ID NO: 2169 - DNA, 19 bp, Artificial Sequence
  Description of Artificial Sequence: Synthetic oligonucleotide
ccaagaaccacgaccatgc

SEQ ID NO: 2170 - DNA, 19 bp, Artificial Sequence
  Description of Artificial Sequence: Synthetic oligonucleotide
caagaaccacgaccatgcc

SEQ ID NO: 2171 - DNA, 19 bp, Artificial Sequence
  Description of Artificial Sequence: Synthetic oligonucleotide
aagaaccacgaccatgcct

SEQ ID NO: 2172 - DNA, 19 bp, Artificial Sequence
  Description of Artificial Sequence: Synthetic oligonucleotide
agaaccacgaccatgcctg

SEQ ID NO: 2173 - DNA, 19 bp, Artificial Sequence
  Description of Artificial Sequence: Synthetic oligonucleotide
gaaccacgaccatgcctgc

SEQ ID NO: 2174 - DNA, 19 bp, Artificial Sequence
  Description of Artificial Sequence: Synthetic oligonucleotide
aaccacgaccatgcctgca

SEQ ID NO: 2175 - DNA, 19 bp, Artificial Sequence
  Description of Artificial Sequence: Synthetic oligonucleotide
accacgaccatgcctgcat

SEQ ID NO: 2176 - DNA, 19 bp, Artificial Sequence
  Description of Artificial Sequence: Synthetic oligonucleotide
ccacgaccatgcctgcatc

SEQ ID NO: 2177 - DNA, 19 bp, Artificial Sequence
  Description of Artificial Sequence: Synthetic oligonucleotide
cacgaccatgcctgcatcg

SEQ ID NO: 2178 - DNA, 19 bp, Artificial Sequence
  Description of Artificial Sequence: Synthetic oligonucleotide
acgaccatgcctgcatcgc

SEQ ID NO: 2179 - DNA, 19 bp, Artificial Sequence
  Description of Artificial Sequence: Synthetic oligonucleotide
cgaccatgcctgcatcgcc

SEQ ID NO: 2180 - DNA, 19 bp, Artificial Sequence
  Description of Artificial Sequence: Synthetic oligonucleotide
gaccatgcctgcatcgcct

SEQ ID NO: 2181 - DNA, 19 bp, Artificial Sequence
  Description of Artificial Sequence: Synthetic oligonucleotide
accatgcctgcatcgcctg

SEQ ID NO: 2182 - DNA, 19 bp, Artificial Sequence
  Description of Artificial Sequence: Synthetic oligonucleotide
ccatgcctgcatcgcctgt

SEQ ID NO: 2183 - DNA, 19 bp, Artificial Sequence
  Description of Artificial Sequence: Synthetic oligonucleotide
catgcctgcatcgcctgtc

SEQ ID NO: 2184 - DNA, 19 bp, Artificial Sequence
  Description of Artificial Sequence: Synthetic oligonucleotide
atgcctgcatcgcctgtcg

SEQ ID NO: 2185 - DNA, 19 bp, Artificial Sequence
  Description of Artificial Sequence: Synthetic oligonucleotide
tgcctgcatcgcctgtcgg

SEQ ID NO: 2186 - DNA, 19 bp, Artificial Sequence
  Description of Artificial Sequence: Synthetic oligonucleotide
gcctgcatcgcctgtcgga

SEQ ID NO: 2187 - DNA, 19 bp, Artificial Sequence
  Description of Artificial Sequence: Synthetic oligonucleotide
cctgcatcgcctgtcggat

SEQ ID NO: 2188 - DNA, 19 bp, Artificial Sequence
  Description of Artificial Sequence: Synthetic oligonucleotide
ctgcatcgcctgtcggatc

SEQ ID NO: 2189 - DNA, 19 bp, Artificial Sequence
  Description of Artificial Sequence: Synthetic oligonucleotide
tgcatcgcctgtcggatca

SEQ ID NO: 2190 - DNA, 19 bp, Artificial Sequence
  Description of Artificial Sequence: Synthetic oligonucleotide
gcatcgcctgtcggatcat

SEQ ID NO: 2191 - DNA, 19 bp, Artificial Sequence
  Description of Artificial Sequence: Synthetic oligonucleotide
catcgcctgtcggatcatc

SEQ ID NO: 2192 - DNA, 19 bp, Artificial Sequence
  Description of Artificial Sequence: Synthetic oligonucleotide
atcgcctgtcggatcatct

SEQ ID NO: 2193 - DNA, 19 bp, Artificial Sequence
  Description of Artificial Sequence: Synthetic oligonucleotide
tcgcctgtcggatcatcta

SEQ ID NO: 2194 - DNA, 19 bp, Artificial Sequence
  Description of Artificial Sequence: Synthetic oligonucleotide
cgcctgtcggatcatctat

SEQ ID NO: 2195 - DNA, 19 bp, Artificial Sequence
  Description of Artificial Sequence: Synthetic oligonucleotide
gcctgtcggatcatctatc

SEQ ID NO: 2196 - DNA, 19 bp, Artificial Sequence
  Description of Artificial Sequence: Synthetic oligonucleotide
cctgtcggatcatctatcg

SEQ ID NO: 2197 - DNA, 19 bp, Artificial Sequence
  Description of Artificial Sequence: Synthetic oligonucleotide
ctgtcggatcatctatcgg

SEQ ID NO: 2198 - DNA, 19 bp, Artificial Sequence
  Description of Artificial Sequence: Synthetic oligonucleotide
tgtcggatcatctatcggt

SEQ ID NO: 2199 - DNA, 19 bp, Artificial Sequence
  Description of Artificial Sequence: Synthetic oligonucleotide
gtcggatcatctatcggtc

SEQ ID NO: 2200 - DNA, 19 bp, Artificial Sequence
  Description of Artificial Sequence: Synthetic oligonucleotide
tcggatcatctatcggtca

SEQ ID NO: 2201 - DNA, 19 bp, Artificial Sequence
  Description of Artificial Sequence: Synthetic oligonucleotide
cggatcatctatcggtcag

SEQ ID NO: 2202 - DNA, 19 bp, Artificial Sequence
  Description of Artificial Sequence: Synthetic oligonucleotide
ggatcatctatcggtcaga

SEQ ID NO: 2203 - DNA, 19 bp, Artificial Sequence
  Description of Artificial Sequence: Synthetic oligonucleotide
gatcatctatcggtcagac

SEQ ID NO: 2204 - DNA, 19 bp, Artificial Sequence
  Description of Artificial Sequence: Synthetic oligonucleotide
atcatctatcggtcagacg

SEQ ID NO: 2205 - DNA, 19 bp, Artificial Sequence
  Description of Artificial Sequence: Synthetic oligonucleotide
tcatctatcggtcagacga

SEQ ID NO: 2206 - DNA, 19 bp, Artificial Sequence
  Description of Artificial Sequence: Synthetic oligonucleotide
catctatcggtcagacgag

SEQ ID NO: 2207 - DNA, 19 bp, Artificial Sequence
  Description of Artificial Sequence: Synthetic oligonucleotide
atctatcggtcagacgagc

SEQ ID NO: 2208 - DNA, 19 bp, Artificial Sequence
  Description of Artificial Sequence: Synthetic oligonucleotide
tctatcggtcagacgagca

SEQ ID NO: 2209 - DNA, 19 bp, Artificial Sequence
  Description of Artificial Sequence: Synthetic oligonucleotide
ctatcggtcagacgagcac

SEQ ID NO: 2210 - DNA, 19 bp, Artificial Sequence
  Description of Artificial Sequence: Synthetic oligonucleotide
tatcggtcagacgagcacc

SEQ ID NO: 2211 - DNA, 19 bp, Artificial Sequence
  Description of Artificial Sequence: Synthetic oligonucleotide
atcggtcagacgagcacca

SEQ ID NO: 2212 - DNA, 19 bp, Artificial Sequence
  Description of Artificial Sequence: Synthetic oligonucleotide
tcggtcagacgagcaccac

SEQ ID NO: 2213 - DNA, 19 bp, Artificial Sequence
  Description of Artificial Sequence: Synthetic oligonucleotide
cggtcagacgagcaccacc

SEQ ID NO: 2214 - DNA, 19 bp, Artificial Sequence
  Description of Artificial Sequence: Synthetic oligonucleotide
ggtcagacgagcaccaccc

SEQ ID NO: 2215 - DNA, 19 bp, Artificial Sequence
  Description of Artificial Sequence: Synthetic oligonucleotide
gtcagacgagcaccaccct

SEQ ID NO: 2216 - DNA, 19 bp, Artificial Sequence
  Description of Artificial Sequence: Synthetic oligonucleotide
tcagacgagcaccaccctc

SEQ ID NO: 2217 - DNA, 19 bp, Artificial Sequence
  Description of Artificial Sequence: Synthetic oligonucleotide
cagacgagcaccaccctcc

SEQ ID NO: 2218 - DNA, 19 bp, Artificial Sequence
  Description of Artificial Sequence: Synthetic oligonucleotide
agacgagcaccaccctccc

SEQ ID NO: 2219 - DNA, 19 bp, Artificial Sequence
  Description of Artificial Sequence: Synthetic oligonucleotide
gacgagcaccaccctccca

SEQ ID NO: 2220 - DNA, 19 bp, Artificial Sequence
  Description of Artificial Sequence: Synthetic oligonucleotide
acgagcaccaccctcccat

SEQ ID NO: 2221 - DNA, 19 bp, Artificial Sequence
  Description of Artificial Sequence: Synthetic oligonucleotide
cgagcaccaccctcccatc

SEQ ID NO: 2222 - DNA, 19 bp, Artificial Sequence
  Description of Artificial Sequence: Synthetic oligonucleotide
gagcaccaccctcccatcc

SEQ ID NO: 2223 - DNA, 19 bp, Artificial Sequence
  Description of Artificial Sequence: Synthetic oligonucleotide
agcaccaccctcccatcct

SEQ ID NO: 2224 - DNA, 19 bp, Artificial Sequence
  Description of Artificial Sequence: Synthetic oligonucleotide
gcaccaccctcccatcctg

SEQ ID NO: 2225 - DNA, 19 bp, Artificial Sequence
  Description of Artificial Sequence: Synthetic oligonucleotide
caccaccctcccatcctgc

SEQ ID NO: 2226 - DNA, 19 bp, Artificial Sequence
  Description of Artificial Sequence: Synthetic oligonucleotide
accaccctcccatcctgcc

SEQ ID NO: 2227 - DNA, 19 bp, Artificial Sequence
  Description of Artificial Sequence: Synthetic oligonucleotide
ccaccctcccatcctgccc

SEQ ID NO: 2228 - DNA, 19 bp, Artificial Sequence
  Description of Artificial Sequence: Synthetic oligonucleotide
caccctcccatcctgcccc

SEQ ID NO: 2229 - DNA, 19 bp, Artificial Sequence
  Description of Artificial Sequence: Synthetic oligonucleotide
accctcccatcctgccccc

SEQ ID NO: 2230 - DNA, 19 bp, Artificial Sequence
  Description of Artificial Sequence: Synthetic oligonucleotide
ccctcccatcctgccccca

SEQ ID NO: 2231 - DNA, 19 bp, Artificial Sequence
  Description of Artificial Sequence: Synthetic oligonucleotide
cctcccatcctgcccccaa

SEQ ID NO: 2232 - DNA, 19 bp, Artificial Sequence
  Description of Artificial Sequence: Synthetic oligonucleotide
ctcccatcctgcccccaaa

SEQ ID NO: 2233 - DNA, 19 bp, Artificial Sequence
  Description of Artificial Sequence: Synthetic oligonucleotide
tcccatcctgcccccaaag

SEQ ID NO: 2234 - DNA, 19 bp, Artificial Sequence
  Description of Artificial Sequence: Synthetic oligonucleotide
cccatcctgcccccaaagg

SEQ ID NO: 2235 - DNA, 19 bp, Artificial Sequence
  Description of Artificial Sequence: Synthetic oligonucleotide
ccatcctgcccccaaaggc

SEQ ID NO: 2236 - DNA, 19 bp, Artificial Sequence
  Description of Artificial Sequence: Synthetic oligonucleotide
catcctgcccccaaaggca

SEQ ID NO: 2237 - DNA, 19 bp, Artificial Sequence
  Description of Artificial Sequence: Synthetic oligonucleotide
atcctgcccccaaaggcag

SEQ ID NO: 2238 - DNA, 19 bp, Artificial Sequence
  Description of Artificial Sequence: Synthetic oligonucleotide
tcctgcccccaaaggcaga

SEQ ID NO: 2239 - DNA, 19 bp, Artificial Sequence
  Description of Artificial Sequence: Synthetic oligonucleotide
cctgcccccaaaggcagac

SEQ ID NO: 2240 - DNA, 19 bp, Artificial Sequence
  Description of Artificial Sequence: Synthetic oligonucleotide
ctgcccccaaaggcagacc

SEQ ID NO: 2241 - DNA, 19 bp, Artificial Sequence
  Description of Artificial Sequence: Synthetic oligonucleotide
tgcccccaaaggcagacct

SEQ ID NO: 2242 - DNA, 19 bp, Artificial Sequence
  Description of Artificial Sequence: Synthetic oligonucleotide
gcccccaaaggcagacctg

SEQ ID NO: 2243 - DNA, 19 bp, Artificial Sequence
  Description of Artificial Sequence: Synthetic oligonucleotide
cccccaaaggcagacctga

SEQ ID NO: 2244 - DNA, 19 bp, Artificial Sequence
  Description of Artificial Sequence: Synthetic oligonucleotide
ccccaaaggcagacctgac

SEQ ID NO: 2245 - DNA, 19 bp, Artificial Sequence
  Description of Artificial Sequence: Synthetic oligonucleotide
cccaaaggcagacctgacc

SEQ ID NO: 2246 - DNA, 19 bp, Artificial Sequence
  Description of Artificial Sequence: Synthetic oligonucleotide
ccaaaggcagacctgacca

SEQ ID NO: 2247 - DNA, 19 bp, Artificial Sequence
  Description of Artificial Sequence: Synthetic oligonucleotide
caaaggcagacctgaccat

SEQ ID NO: 2248 - DNA, 19 bp, Artificial Sequence
  Description of Artificial Sequence: Synthetic oligonucleotide
aaaggcagacctgaccatc

SEQ ID NO: 2249 - DNA, 19 bp, Artificial Sequence
  Description of Artificial Sequence: Synthetic oligonucleotide
aaggcagacctgaccatcg

SEQ ID NO: 2250 - DNA, 19 bp, Artificial Sequence
  Description of Artificial Sequence: Synthetic oligonucleotide
aggcagacctgaccatcgg

SEQ ID NO: 2251 - DNA, 19 bp, Artificial Sequence
  Description of Artificial Sequence: Synthetic oligonucleotide
ggcagacctgaccatcggc

SEQ ID NO: 2252 - DNA, 19 bp, Artificial Sequence
  Description of Artificial Sequence: Synthetic oligonucleotide
gcagacctgaccatcggcc

SEQ ID NO: 2253 - DNA, 19 bp, Artificial Sequence
  Description of Artificial Sequence: Synthetic oligonucleotide
cagacctgaccatcggcct

SEQ ID NO: 2254 - DNA, 19 bp, Artificial Sequence
  Description of Artificial Sequence: Synthetic oligonucleotide
agacctgaccatcggcctg

SEQ ID NO: 2255 - DNA, 19 bp, Artificial Sequence
  Description of Artificial Sequence: Synthetic oligonucleotide
gacctgaccatcggcctgc

SEQ ID NO: 2256 - DNA, 19 bp, Artificial Sequence
  Description of Artificial Sequence: Synthetic oligonucleotide
acctgaccatcggcctgca

SEQ ID NO: 2257 - DNA, 19 bp, Artificial Sequence
  Description of Artificial Sequence: Synthetic oligonucleotide
cctgaccatcggcctgcac

SEQ ID NO: 2258 - DNA, 19 bp, Artificial Sequence
  Description of Artificial Sequence: Synthetic oligonucleotide
ctgaccatcggcctgcacg

SEQ ID NO: 2259 - DNA, 19 bp, Artificial Sequence
  Description of Artificial Sequence: Synthetic oligonucleotide
tgaccatcggcctgcacgg

SEQ ID NO: 2260 - DNA, 19 bp, Artificial Sequence
  Description of Artificial Sequence: Synthetic oligonucleotide
gaccatcggcctgcacggg

SEQ ID NO: 2261 - DNA, 19 bp, Artificial Sequence
  Description of Artificial Sequence: Synthetic oligonucleotide
accatcggcctgcacgggg

SEQ ID NO: 2262 - DNA, 19 bp, Artificial Sequence
  Description of Artificial Sequence: Synthetic oligonucleotide
ccatcggcctgcacgggga

SEQ ID NO: 2263 - DNA, 19 bp, Artificial Sequence
  Description of Artificial Sequence: Synthetic oligonucleotide
catcggcctgcacggggag

SEQ ID NO: 2264 - DNA, 19 bp, Artificial Sequence
  Description of Artificial Sequence: Synthetic oligonucleotide
atcggcctgcacggggagt

SEQ ID NO: 2265 - DNA, 19 bp, Artificial Sequence
  Description of Artificial Sequence: Synthetic oligonucleotide
tcggcctgcacggggagtg

SEQ ID NO: 2266 - DNA, 19 bp, Artificial Sequence
  Description of Artificial Sequence: Synthetic oligonucleotide
cggcctgcacggggagtgg

SEQ ID NO: 2267 - DNA, 19 bp, Artificial Sequence
  Description of Artificial Sequence: Synthetic oligonucleotide
ggcctgcacggggagtggg

SEQ ID NO: 2268 - DNA, 19 bp, Artificial Sequence
  Description of Artificial Sequence: Synthetic oligonucleotide
gcctgcacggggagtgggt

SEQ ID NO: 2269 - DNA, 19 bp, Artificial Sequence
  Description of Artificial Sequence: Synthetic oligonucleotide
cctgcacggggagtgggtg

SEQ ID NO: 2270 - DNA, 19 bp, Artificial Sequence
  Description of Artificial Sequence: Synthetic oligonucleotide
ctgcacggggagtgggtga

SEQ ID NO: 2271 - DNA, 19 bp, Artificial Sequence
  Description of Artificial Sequence: Synthetic oligonucleotide
tgcacggggagtgggtgag

SEQ ID NO: 2272 - DNA, 19 bp, Artificial Sequence
  Description of Artificial Sequence: Synthetic oligonucleotide
gcacggggagtgggtgagc

SEQ ID NO: 2273 - DNA, 19 bp, Artificial Sequence
  Description of Artificial Sequence: Synthetic oligonucleotide
cacggggagtgggtgagcc

SEQ ID NO: 2274 - DNA, 19 bp, Artificial Sequence
  Description of Artificial Sequence: Synthetic oligonucleotide
acggggagtgggtgagcca

SEQ ID NO: 2275 - DNA, 19 bp, Artificial Sequence
  Description of Artificial Sequence: Synthetic oligonucleotide
cggggagtgggtgagccag

SEQ ID NO: 2276 - DNA, 19 bp, Artificial Sequence
  Description of Artificial Sequence: Synthetic oligonucleotide
ggggagtgggtgagccagc

SEQ ID NO: 2277 - DNA, 19 bp, Artificial Sequence
  Description of Artificial Sequence: Synthetic oligonucleotide
gggagtgggtgagccagcg

SEQ ID NO: 2278 - DNA, 19 bp, Artificial Sequence
  Description of Artificial Sequence: Synthetic oligonucleotide
ggagtgggtgagccagcgc

SEQ ID NO: 2279 - DNA, 19 bp, Artificial Sequence
  Description of Artificial Sequence: Synthetic oligonucleotide
gagtgggtgagccagcgct

SEQ ID NO: 2280 - DNA, 19 bp, Artificial Sequence
  Description of Artificial Sequence: Synthetic oligonucleotide
agtgggtgagccagcgctg

SEQ ID NO: 2281 - DNA, 19 bp, Artificial Sequence
  Description of Artificial Sequence: Synthetic oligonucleotide
gtgggtgagccagcgctgt

SEQ ID NO: 2282 - DNA, 19 bp, Artificial Sequence
  Description of Artificial Sequence: Synthetic oligonucleotide
tgggtgagccagcgctgtg

SEQ ID NO: 2283 - DNA, 19 bp, Artificial Sequence
  Description of Artificial Sequence: Synthetic oligonucleotide
gggtgagccagcgctgtga

SEQ ID NO: 2284 - DNA, 19 bp, Artificial Sequence
  Description of Artificial Sequence: Synthetic oligonucleotide
ggtgagccagcgctgtgag

SEQ ID NO: 2285 - DNA, 19 bp, Artificial Sequence
  Description of Artificial Sequence: Synthetic oligonucleotide
gtgagccagcgctgtgagg

SEQ ID NO: 2286 - DNA, 19 bp, Artificial Sequence
  Description of Artificial Sequence: Synthetic oligonucleotide
tgagccagcgctgtgaggt

SEQ ID NO: 2287 - DNA, 19 bp, Artificial Sequence
  Description of Artificial Sequence: Synthetic oligonucleotide
gagccagcgctgtgaggtg

SEQ ID NO: 2288 - DNA, 19 bp, Artificial Sequence
  Description of Artificial Sequence: Synthetic oligonucleotide
agccagcgctgtgaggtgc

SEQ ID NO: 2289 - DNA, 19 bp, Artificial Sequence
  Description of Artificial Sequence: Synthetic oligonucleotide
gccagcgctgtgaggtgcg

SEQ ID NO: 2290 - DNA, 19 bp, Artificial Sequence
  Description of Artificial Sequence: Synthetic oligonucleotide
ccagcgctgtgaggtgcgc

SEQ ID NO: 2291 - DNA, 19 bp, Artificial Sequence
  Description of Artificial Sequence: Synthetic oligonucleotide
cagcgctgtgaggtgcgcc

SEQ ID NO: 2292 - DNA, 19 bp, Artificial Sequence
  Description of Artificial Sequence: Synthetic oligonucleotide
agcgctgtgaggtgcgccc

SEQ ID NO: 2293 - DNA, 19 bp, Artificial Sequence
  Description of Artificial Sequence: Synthetic oligonucleotide
gcgctgtgaggtgcgcccc

SEQ ID NO: 2294 - DNA, 19 bp, Artificial Sequence
  Description of Artificial Sequence: Synthetic oligonucleotide
cgctgtgaggtgcgccccg

SEQ ID NO: 2295 - DNA, 19 bp, Artificial Sequence
  Description of Artificial Sequence: Synthetic oligonucleotide
gctgtgaggtgcgccccga

SEQ ID NO: 2296 - DNA, 19 bp, Artificial Sequence
  Description of Artificial Sequence: Synthetic oligonucleotide
ctgtgaggtgcgccccgaa

SEQ ID NO: 2297 - DNA, 19 bp, Artificial Sequence
  Description of Artificial Sequence: Synthetic oligonucleotide
tgtgaggtgcgccccgaag

SEQ ID NO: 2298 - DNA, 19 bp, Artificial Sequence
  Description of Artificial Sequence: Synthetic oligonucleotide
gtgaggtgcgccccgaagt

SEQ ID NO: 2299 - DNA, 19 bp, Artificial Sequence
  Description of Artificial Sequence: Synthetic oligonucleotide
tgaggtgcgccccgaagtc

SEQ ID NO: 2300 - DNA, 19 bp, Artificial Sequence
  Description of Artificial Sequence: Synthetic oligonucleotide
gaggtgcgccccgaagtcc

SEQ ID NO: 2301 - DNA, 19 bp, Artificial Sequence
  Description of Artificial Sequence: Synthetic oligonucleotide
aggtgcgccccgaagtcct

SEQ ID NO: 2302 - DNA, 19 bp, Artificial Sequence
  Description of Artificial Sequence: Synthetic oligonucleotide
ggtgcgccccgaagtcctc

SEQ ID NO: 2303 - DNA, 19 bp, Artificial Sequence
  Description of Artificial Sequence: Synthetic oligonucleotide
gtgcgccccgaagtcctct

SEQ ID NO: 2304 - DNA, 19 bp, Artificial Sequence
  Description of Artificial Sequence: Synthetic oligonucleotide
tgcgccccgaagtcctctt

SEQ ID NO: 2305 - DNA, 19 bp, Artificial Sequence
  Description of Artificial Sequence: Synthetic oligonucleotide
gcgccccgaagtcctcttc

SEQ ID NO: 2306 - DNA, 19 bp, Artificial Sequence
  Description of Artificial Sequence: Synthetic oligonucleotide
cgccccgaagtcctcttcc

SEQ ID NO: 2307 - DNA, 19 bp, Artificial Sequence
  Description of Artificial Sequence: Synthetic oligonucleotide
gccccgaagtcctcttcct

SEQ ID NO: 2308 - DNA, 19 bp, Artificial Sequence
  Description of Artificial Sequence: Synthetic oligonucleotide
ccccgaagtcctcttcctc

SEQ ID NO: 2309 - DNA, 19 bp, Artificial Sequence
  Description of Artificial Sequence: Synthetic oligonucleotide
cccgaagtcctcttcctca

SEQ ID NO: 2310 - DNA, 19 bp, Artificial Sequence
  Description of Artificial Sequence: Synthetic oligonucleotide
ccgaagtcctcttcctcac

SEQ ID NO: 2311 - DNA, 19 bp, Artificial Sequence
  Description of Artificial Sequence: Synthetic oligonucleotide
cgaagtcctcttcctcacc

SEQ ID NO: 2312 - DNA, 19 bp, Artificial Sequence
  Description of Artificial Sequence: Synthetic oligonucleotide
gaagtcctcttcctcaccc

SEQ ID NO: 2313 - DNA, 19 bp, Artificial Sequence
  Description of Artificial Sequence: Synthetic oligonucleotide
aagtcctcttcctcacccg

SEQ ID NO: 2314 - DNA, 19 bp, Artificial Sequence
  Description of Artificial Sequence: Synthetic oligonucleotide
agtcctcttcctcacccgc

SEQ ID NO: 2315 - DNA, 19 bp, Artificial Sequence
  Description of Artificial Sequence: Synthetic oligonucleotide
gtcctcttcctcacccgcc

SEQ ID NO: 2316 - DNA, 19 bp, Artificial Sequence
  Description of Artificial Sequence: Synthetic oligonucleotide
tcctcttcctcacccgcca

SEQ ID NO: 2317 - DNA, 19 bp, Artificial Sequence
  Description of Artificial Sequence: Synthetic oligonucleotide
cctcttcctcacccgccac

SEQ ID NO: 2318 - DNA, 19 bp, Artificial Sequence
  Description of Artificial Sequence: Synthetic oligonucleotide
ctcttcctcacccgccact

SEQ ID NO: 2319 - DNA, 19 bp, Artificial Sequence
  Description of Artificial Sequence: Synthetic oligonucleotide
tcttcctcacccgccactt

SEQ ID NO: 2320 - DNA, 19 bp, Artificial Sequence
  Description of Artificial Sequence: Synthetic oligonucleotide
cttcctcacccgccacttc

SEQ ID NO: 2321 - DNA, 19 bp, Artificial Sequence
  Description of Artificial Sequence: Synthetic oligonucleotide
ttcctcacccgccacttca

SEQ ID NO: 2322 - DNA, 19 bp, Artificial Sequence
  Description of Artificial Sequence: Synthetic oligonucleotide
tcctcacccgccacttcat

SEQ ID NO: 2323 - DNA, 19 bp, Artificial Sequence
  Description of Artificial Sequence: Synthetic oligonucleotide
cctcacccgccacttcatc

SEQ ID NO: 2324 - DNA, 19 bp, Artificial Sequence
  Description of Artificial Sequence: Synthetic oligonucleotide
ctcacccgccacttcatct

SEQ ID NO: 2325 - DNA, 19 bp, Artificial Sequence
  Description of Artificial Sequence: Synthetic oligonucleotide
tcacccgccacttcatctt

SEQ ID NO: 2326 - DNA, 19 bp, Artificial Sequence
  Description of Artificial Sequence: Synthetic oligonucleotide
cacccgccacttcatcttc

SEQ ID NO: 2327 - DNA, 19 bp, Artificial Sequence
  Description of Artificial Sequence: Synthetic oligonucleotide
acccgccacttcatcttcc

SEQ ID NO: 2328 - DNA, 19 bp, Artificial Sequence
  Description of Artificial Sequence: Synthetic oligonucleotide
cccgccacttcatcttcca

SEQ ID NO: 2329 - DNA, 19 bp, Artificial Sequence
  Description of Artificial Sequence: Synthetic oligonucleotide
ccgccacttcatcttccat

SEQ ID NO: 2330 - DNA, 19 bp, Artificial Sequence
  Description of Artificial Sequence: Synthetic oligonucleotide
cgccacttcatcttccatg

SEQ ID NO: 2331 - DNA, 19 bp, Artificial Sequence
  Description of Artificial Sequence: Synthetic oligonucleotide
gccacttcatcttccatga

SEQ ID NO: 2332 - DNA, 19 bp, Artificial Sequence
  Description of Artificial Sequence: Synthetic oligonucleotide
ccacttcatcttccatgac

SEQ ID NO: 2333 - DNA, 19 bp, Artificial Sequence
  Description of Artificial Sequence: Synthetic oligonucleotide
cacttcatcttccatgaca

SEQ ID NO: 2334 - DNA, 19 bp, Artificial Sequence
  Description of Artificial Sequence: Synthetic oligonucleotide
acttcatcttccatgacaa

SEQ ID NO: 2335 - DNA, 19 bp, Artificial Sequence
  Description of Artificial Sequence: Synthetic oligonucleotide
cttcatcttccatgacaac

SEQ ID NO: 2336 - DNA, 19 bp, Artificial Sequence
  Description of Artificial Sequence: Synthetic oligonucleotide
ttcatcttccatgacaaca

SEQ ID NO: 2337 - DNA, 19 bp, Artificial Sequence
  Description of Artificial Sequence: Synthetic oligonucleotide
tcatcttccatgacaacaa

SEQ ID NO: 2338 - DNA, 19 bp, Artificial Sequence
  Description of Artificial Sequence: Synthetic oligonucleotide
catcttccatgacaacaac

SEQ ID NO: 2339 - DNA, 19 bp, Artificial Sequence
  Description of Artificial Sequence: Synthetic oligonucleotide
atcttccatgacaacaaca

SEQ ID NO: 2340 - DNA, 19 bp, Artificial Sequence
  Description of Artificial Sequence: Synthetic oligonucleotide
tcttccatgacaacaacaa

SEQ ID NO: 2341 - DNA, 19 bp, Artificial Sequence
  Description of Artificial Sequence: Synthetic oligonucleotide
cttccatgacaacaacaac

SEQ ID NO: 2342 - DNA, 19 bp, Artificial Sequence
  Description of Artificial Sequence: Synthetic oligonucleotide
ttccatgacaacaacaaca

SEQ ID NO: 2343 - DNA, 19 bp, Artificial Sequence
  Description of Artificial Sequence: Synthetic oligonucleotide
tccatgacaacaacaacac

SEQ ID NO: 2344 - DNA, 19 bp, Artificial Sequence
  Description of Artificial Sequence: Synthetic oligonucleotide
ccatgacaacaacaacacc

SEQ ID NO: 2345 - DNA, 19 bp, Artificial Sequence
  Description of Artificial Sequence: Synthetic oligonucleotide
catgacaacaacaacacct

SEQ ID NO: 2346 - DNA, 19 bp, Artificial Sequence
  Description of Artificial Sequence: Synthetic oligonucleotide
atgacaacaacaacacctg

SEQ ID NO: 2347 - DNA, 19 bp, Artificial Sequence
  Description of Artificial Sequence: Synthetic oligonucleotide
tgacaacaacaacacctgg

SEQ ID NO: 2348 - DNA, 19 bp, Artificial Sequence
  Description of Artificial Sequence: Synthetic oligonucleotide
gacaacaacaacacctggg

SEQ ID NO: 2349 - DNA, 19 bp, Artificial Sequence
  Description of Artificial Sequence: Synthetic oligonucleotide
acaacaacaacacctggga

SEQ ID NO: 2350 - DNA, 19 bp, Artificial Sequence
  Description of Artificial Sequence: Synthetic oligonucleotide
caacaacaacacctgggag

SEQ ID NO: 2351 - DNA, 19 bp, Artificial Sequence
  Description of Artificial Sequence: Synthetic oligonucleotide
aacaacaacacctgggagg

SEQ ID NO: 2352 - DNA, 19 bp, Artificial Sequence
  Description of Artificial Sequence: Synthetic oligonucleotide
acaacaacacctgggaggg

SEQ ID NO: 2353 - DNA, 19 bp, Artificial Sequence
  Description of Artificial Sequence: Synthetic oligonucleotide
caacaacacctgggagggc

SEQ ID NO: 2354 - DNA, 19 bp, Artificial Sequence
  Description of Artificial Sequence: Synthetic oligonucleotide
aacaacacctgggagggcc

SEQ ID NO: 2355 - DNA, 19 bp, Artificial Sequence
  Description of Artificial Sequence: Synthetic oligonucleotide
acaacacctgggagggcca

SEQ ID NO: 2356 - DNA, 19 bp, Artificial Sequence
  Description of Artificial Sequence: Synthetic oligonucleotide
caacacctgggagggccac

SEQ ID NO: 2357 - DNA, 19 bp, Artificial Sequence
  Description of Artificial Sequence: Synthetic oligonucleotide
aacacctgggagggccact

SEQ ID NO: 2358 - DNA, 19 bp, Artificial Sequence
  Description of Artificial Sequence: Synthetic oligonucleotide
acacctgggagggccacta

SEQ ID NO: 2359 - DNA, 19 bp, Artificial Sequence
  Description of Artificial Sequence: Synthetic oligonucleotide
cacctgggagggccactac

SEQ ID NO: 2360 - DNA, 19 bp, Artificial Sequence
  Description of Artificial Sequence: Synthetic oligonucleotide
acctgggagggccactact

SEQ ID NO: 2361 - DNA, 19 bp, Artificial Sequence
  Description of Artificial Sequence: Synthetic oligonucleotide
cctgggagggccactacta

SEQ ID NO: 2362 - DNA, 19 bp, Artificial Sequence
  Description of Artificial Sequence: Synthetic oligonucleotide
ctgggagggccactactac

SEQ ID NO: 2363 - DNA, 19 bp, Artificial Sequence
  Description of Artificial Sequence: Synthetic oligonucleotide
tgggagggccactactacc

SEQ ID NO: 2364 - DNA, 19 bp, Artificial Sequence
  Description of Artificial Sequence: Synthetic oligonucleotide
gggagggccactactacca

SEQ ID NO: 2365 - DNA, 19 bp, Artificial Sequence
  Description of Artificial Sequence: Synthetic oligonucleotide
ggagggccactactaccac

SEQ ID NO: 2366 - DNA, 19 bp, Artificial Sequence
  Description of Artificial Sequence: Synthetic oligonucleotide
gagggccactactaccact

SEQ ID NO: 2367 - DNA, 19 bp, Artificial Sequence
  Description of Artificial Sequence: Synthetic oligonucleotide
agggccactactaccacta

SEQ ID NO: 2368 - DNA, 19 bp, Artificial Sequence
  Description of Artificial Sequence: Synthetic oligonucleotide
gggccactactaccactac

SEQ ID NO: 2369 - DNA, 19 bp, Artificial Sequence
  Description of Artificial Sequence: Synthetic oligonucleotide
ggccactactaccactact

SEQ ID NO: 2370 - DNA, 19 bp, Artificial Sequence
  Description of Artificial Sequence: Synthetic oligonucleotide
gccactactaccactactc

SEQ ID NO: 2371 - DNA, 19 bp, Artificial Sequence
  Description of Artificial Sequence: Synthetic oligonucleotide
ccactactaccactactca

SEQ ID NO: 2372 - DNA, 19 bp, Artificial Sequence
  Description of Artificial Sequence: Synthetic oligonucleotide
cactactaccactactcag

SEQ ID NO: 2373 - DNA, 19 bp, Artificial Sequence
  Description of Artificial Sequence: Synthetic oligonucleotide
actactaccactactcaga

SEQ ID NO: 2374 - DNA, 19 bp, Artificial Sequence
  Description of Artificial Sequence: Synthetic oligonucleotide
ctactaccactactcagac

SEQ ID NO: 2375 - DNA, 19 bp, Artificial Sequence
  Description of Artificial Sequence: Synthetic oligonucleotide
tactaccactactcagacc

SEQ ID NO: 2376 - DNA, 19 bp, Artificial Sequence
  Description of Artificial Sequence: Synthetic oligonucleotide
actaccactactcagaccc

SEQ ID NO: 2377 - DNA, 19 bp, Artificial Sequence
  Description of Artificial Sequence: Synthetic oligonucleotide
ctaccactactcagacccg

SEQ ID NO: 2378 - DNA, 19 bp, Artificial Sequence
  Description of Artificial Sequence: Synthetic oligonucleotide
taccactactcagacccgg

SEQ ID NO: 2379 - DNA, 19 bp, Artificial Sequence
  Description of Artificial Sequence: Synthetic oligonucleotide
accactactcagacccggt

SEQ ID NO: 2380 - DNA, 19 bp, Artificial Sequence
  Description of Artificial Sequence: Synthetic oligonucleotide
ccactactcagacccggtg

SEQ ID NO: 2381 - DNA, 19 bp, Artificial Sequence
  Description of Artificial Sequence: Synthetic oligonucleotide
cactactcagacccggtgt

SEQ ID NO: 2382 - DNA, 19 bp, Artificial Sequence
  Description of Artificial Sequence: Synthetic oligonucleotide
actactcagacccggtgtg

SEQ ID NO: 2383 - DNA, 19 bp, Artificial Sequence
  Description of Artificial Sequence: Synthetic oligonucleotide
ctactcagacccggtgtgc

SEQ ID NO: 2384 - DNA, 19 bp, Artificial Sequence
  Description of Artificial Sequence: Synthetic oligonucleotide
tactcagacccggtgtgca

SEQ ID NO: 2385 - DNA, 19 bp, Artificial Sequence
  Description of Artificial Sequence: Synthetic oligonucleotide
actcagacccggtgtgcaa

SEQ ID NO: 2386 - DNA, 19 bp, Artificial Sequence
  Description of Artificial Sequence: Synthetic oligonucleotide
ctcagacccggtgtgcaag

SEQ ID NO: 2387 - DNA, 19 bp, Artificial Sequence
  Description of Artificial Sequence: Synthetic oligonucleotide
tcagacccggtgtgcaagc

SEQ ID NO: 2388 - DNA, 19 bp, Artificial Sequence
  Description of Artificial Sequence: Synthetic oligonucleotide
cagacccggtgtgcaagca

SEQ ID NO: 2389 - DNA, 19 bp, Artificial Sequence
  Description of Artificial Sequence: Synthetic oligonucleotide
agacccggtgtgcaagcac

SEQ ID NO: 2390 - DNA, 19 bp, Artificial Sequence
  Description of Artificial Sequence: Synthetic oligonucleotide
gacccggtgtgcaagcacc

SEQ ID NO: 2391 - DNA, 19 bp, Artificial Sequence
  Description of Artificial Sequence: Synthetic oligonucleotide
acccggtgtgcaagcaccc

SEQ ID NO: 2392 - DNA, 19 bp, Artificial Sequence
  Description of Artificial Sequence: Synthetic oligonucleotide
cccggtgtgcaagcacccc

SEQ ID NO: 2393 - DNA, 19 bp, Artificial Sequence
  Description of Artificial Sequence: Synthetic oligonucleotide
ccggtgtgcaagcacccca

SEQ ID NO: 2394 - DNA, 19 bp, Artificial Sequence
  Description of Artificial Sequence: Synthetic oligonucleotide
cggtgtgcaagcaccccac

SEQ ID NO: 2395 - DNA, 19 bp, Artificial Sequence
  Description of Artificial Sequence: Synthetic oligonucleotide
ggtgtgcaagcaccccacc

SEQ ID NO: 2396 - DNA, 19 bp, Artificial Sequence
  Description of Artificial Sequence: Synthetic oligonucleotide
gtgtgcaagcaccccacct

SEQ ID NO: 2397 - DNA, 19 bp, Artificial Sequence
  Description of Artificial Sequence: Synthetic oligonucleotide
tgtgcaagcaccccacctt

SEQ ID NO: 2398 - DNA, 19 bp, Artificial Sequence
  Description of Artificial Sequence: Synthetic oligonucleotide
gtgcaagcaccccaccttc

SEQ ID NO: 2399 - DNA, 19 bp, Artificial Sequence
  Description of Artificial Sequence: Synthetic oligonucleotide
tgcaagcaccccaccttct

SEQ ID NO: 2400 - DNA, 19 bp, Artificial Sequence
  Description of Artificial Sequence: Synthetic oligonucleotide
gcaagcaccccaccttctc

SEQ ID NO: 2401 - DNA, 19 bp, Artificial Sequence
  Description of Artificial Sequence: Synthetic oligonucleotide
caagcaccccaccttctcc

SEQ ID NO: 2402 - DNA, 19 bp, Artificial Sequence
  Description of Artificial Sequence: Synthetic oligonucleotide
aagcaccccaccttctcca

SEQ ID NO: 2403 - DNA, 19 bp, Artificial Sequence
  Description of Artificial Sequence: Synthetic oligonucleotide
agcaccccaccttctccat

SEQ ID NO: 2404 - DNA, 19 bp, Artificial Sequence
  Description of Artificial Sequence: Synthetic oligonucleotide
gcaccccaccttctccatc

SEQ ID NO: 2405 - DNA, 19 bp, Artificial Sequence
  Description of Artificial Sequence: Synthetic oligonucleotide
caccccaccttctccatct

SEQ ID NO: 2406 - DNA, 19 bp, Artificial Sequence
  Description of Artificial Sequence: Synthetic oligonucleotide
accccaccttctccatcta

SEQ ID NO: 2407 - DNA, 19 bp, Artificial Sequence
  Description of Artificial Sequence: Synthetic oligonucleotide
ccccaccttctccatctac

SEQ ID NO: 2408 - DNA, 19 bp, Artificial Sequence
  Description of Artificial Sequence: Synthetic oligonucleotide
cccaccttctccatctacg

SEQ ID NO: 2409 - DNA, 19 bp, Artificial Sequence
  Description of Artificial Sequence: Synthetic oligonucleotide
ccaccttctccatctacgc

SEQ ID NO: 2410 - DNA, 19 bp, Artificial Sequence
  Description of Artificial Sequence: Synthetic oligonucleotide
caccttctccatctacgcc

SEQ ID NO: 2411 - DNA, 19 bp, Artificial Sequence
  Description of Artificial Sequence: Synthetic oligonucleotide
accttctccatctacgccc

SEQ ID NO: 2412 - DNA, 19 bp, Artificial Sequence
  Description of Artificial Sequence: Synthetic oligonucleotide
ccttctccatctacgcccg

SEQ ID NO: 2413 - DNA, 19 bp, Artificial Sequence
  Description of Artificial Sequence: Synthetic oligonucleotide
cttctccatctacgcccgg

SEQ ID NO: 2414 - DNA, 19 bp, Artificial Sequence
  Description of Artificial Sequence: Synthetic oligonucleotide
ttctccatctacgcccggg

SEQ ID NO: 2415 - DNA, 19 bp, Artificial Sequence
  Description of Artificial Sequence: Synthetic oligonucleotide
tctccatctacgcccgggg

SEQ ID NO: 2416 - DNA, 19 bp, Artificial Sequence
  Description of Artificial Sequence: Synthetic oligonucleotide
ctccatctacgcccggggc

SEQ ID NO: 2417 - DNA, 19 bp, Artificial Sequence
  Description of Artificial Sequence: Synthetic oligonucleotide
tccatctacgcccggggcc

SEQ ID NO: 2418 - DNA, 19 bp, Artificial Sequence
  Description of Artificial Sequence: Synthetic oligonucleotide
ccatctacgcccggggccg

SEQ ID NO: 2419 - DNA, 19 bp, Artificial Sequence
  Description of Artificial Sequence: Synthetic oligonucleotide
catctacgcccggggccgc

SEQ ID NO: 2420 - DNA, 19 bp, Artificial Sequence
  Description of Artificial Sequence: Synthetic oligonucleotide
atctacgcccggggccgct

SEQ ID NO: 2421 - DNA, 19 bp, Artificial Sequence
  Description of Artificial Sequence: Synthetic oligonucleotide
tctacgcccggggccgcta

SEQ ID NO: 2422 - DNA, 19 bp, Artificial Sequence
  Description of Artificial Sequence: Synthetic oligonucleotide
ctacgcccggggccgctac

SEQ ID NO: 2423 - DNA, 19 bp, Artificial Sequence
  Description of Artificial Sequence: Synthetic oligonucleotide
tacgcccggggccgctaca

SEQ ID NO: 2424 - DNA, 19 bp, Artificial Sequence
  Description of Artificial Sequence: Synthetic oligonucleotide
acgcccggggccgctacag

SEQ ID NO: 2425 - DNA, 19 bp, Artificial Sequence
  Description of Artificial Sequence: Synthetic oligonucleotide
cgcccggggccgctacagc

SEQ ID NO: 2426 - DNA, 19 bp, Artificial Sequence
  Description of Artificial Sequence: Synthetic oligonucleotide
gcccggggccgctacagcc

SEQ ID NO: 2427 - DNA, 19 bp, Artificial Sequence
  Description of Artificial Sequence: Synthetic oligonucleotide
cccggggccgctacagccg

SEQ ID NO: 2428 - DNA, 19 bp, Artificial Sequence
  Description of Artificial Sequence: Synthetic oligonucleotide
ccggggccgctacagccgc

SEQ ID NO: 2429 - DNA, 19 bp, Artificial Sequence
  Description of Artificial Sequence: Synthetic oligonucleotide
cggggccgctacagccgcg

SEQ ID NO: 2430 - DNA, 19 bp, Artificial Sequence
  Description of Artificial Sequence: Synthetic oligonucleotide
ggggccgctacagccgcgg

SEQ ID NO: 2431 - DNA, 19 bp, Artificial Sequence
  Description of Artificial Sequence: Synthetic oligonucleotide
gggccgctacagccgcggc

SEQ ID NO: 2432 - DNA, 19 bp, Artificial Sequence
  Description of Artificial Sequence: Synthetic oligonucleotide
ggccgctacagccgcggcg

SEQ ID NO: 2433 - DNA, 19 bp, Artificial Sequence
  Description of Artificial Sequence: Synthetic oligonucleotide
gccgctacagccgcggcgt

SEQ ID NO: 2434 - DNA, 19 bp, Artificial Sequence
  Description of Artificial Sequence: Synthetic oligonucleotide
ccgctacagccgcggcgtc

SEQ ID NO: 2435 - DNA, 19 bp, Artificial Sequence
  Description of Artificial Sequence: Synthetic oligonucleotide
cgctacagccgcggcgtcc

SEQ ID NO: 2436 - DNA, 19 bp, Artificial Sequence
  Description of Artificial Sequence: Synthetic oligonucleotide
gctacagccgcggcgtcct

SEQ ID NO: 2437 - DNA, 19 bp, Artificial Sequence
  Description of Artificial Sequence: Synthetic oligonucleotide
ctacagccgcggcgtcctc

SEQ ID NO: 2438 - DNA, 19 bp, Artificial Sequence
  Description of Artificial Sequence: Synthetic oligonucleotide
tacagccgcggcgtcctct

SEQ ID NO: 2439 - DNA, 19 bp, Artificial Sequence
  Description of Artificial Sequence: Synthetic oligonucleotide
acagccgcggcgtcctctc

SEQ ID NO: 2440 - DNA, 19 bp, Artificial Sequence
  Description of Artificial Sequence: Synthetic oligonucleotide
cagccgcggcgtcctctcg

SEQ ID NO: 2441 - DNA, 19 bp, Artificial Sequence
  Description of Artificial Sequence: Synthetic oligonucleotide
agccgcggcgtcctctcgt

SEQ ID NO: 2442 - DNA, 19 bp, Artificial Sequence
  Description of Artificial Sequence: Synthetic oligonucleotide
gccgcggcgtcctctcgtc

SEQ ID NO: 2443 - DNA, 19 bp, Artificial Sequence
  Description of Artificial Sequence: Synthetic oligonucleotide
ccgcggcgtcctctcgtcc

SEQ ID NO: 2444 - DNA, 19 bp, Artificial Sequence
  Description of Artificial Sequence: Synthetic oligonucleotide
cgcggcgtcctctcgtcca

SEQ ID NO: 2445 - DNA, 19 bp, Artificial Sequence
  Description of Artificial Sequence: Synthetic oligonucleotide
gcggcgtcctctcgtccag

SEQ ID NO: 2446 - DNA, 19 bp, Artificial Sequence
  Description of Artificial Sequence: Synthetic oligonucleotide
cggcgtcctctcgtccagg

SEQ ID NO: 2447 - DNA, 19 bp, Artificial Sequence
  Description of Artificial Sequence: Synthetic oligonucleotide
ggcgtcctctcgtccaggg

SEQ ID NO: 2448 - DNA, 19 bp, Artificial Sequence
  Description of Artificial Sequence: Synthetic oligonucleotide
gcgtcctctcgtccagggt

SEQ ID NO: 2449 - DNA, 19 bp, Artificial Sequence
  Description of Artificial Sequence: Synthetic oligonucleotide
cgtcctctcgtccagggtc

SEQ ID NO: 2450 - DNA, 19 bp, Artificial Sequence
  Description of Artificial Sequence: Synthetic oligonucleotide
gtcctctcgtccagggtca

SEQ ID NO: 2451 - DNA, 19 bp, Artificial Sequence
  Description of Artificial Sequence: Synthetic oligonucleotide
tcctctcgtccagggtcat

SEQ ID NO: 2452 - DNA, 19 bp, Artificial Sequence
  Description of Artificial Sequence: Synthetic oligonucleotide
cctctcgtccagggtcatg

SEQ ID NO: 2453 - DNA, 19 bp, Artificial Sequence
  Description of Artificial Sequence: Synthetic oligonucleotide
ctctcgtccagggtcatgg

SEQ ID NO: 2454 - DNA, 19 bp, Artificial Sequence
  Description of Artificial Sequence: Synthetic oligonucleotide
tctcgtccagggtcatggg

SEQ ID NO: 2455 - DNA, 19 bp, Artificial Sequence
  Description of Artificial Sequence: Synthetic oligonucleotide
ctcgtccagggtcatggga

SEQ ID NO: 2456 - DNA, 19 bp, Artificial Sequence
  Description of Artificial Sequence: Synthetic oligonucleotide
tcgtccagggtcatgggag

SEQ ID NO: 2457 - DNA, 19 bp, Artificial Sequence
  Description of Artificial Sequence: Synthetic oligonucleotide
cgtccagggtcatgggagg

SEQ ID NO: 2458 - DNA, 19 bp, Artificial Sequence
  Description of Artificial Sequence: Synthetic oligonucleotide
gtccagggtcatgggaggc

SEQ ID NO: 2459 - DNA, 19 bp, Artificial Sequence
  Description of Artificial Sequence: Synthetic oligonucleotide
tccagggtcatgggaggca

SEQ ID NO: 2460 - DNA, 19 bp, Artificial Sequence
  Description of Artificial Sequence: Synthetic oligonucleotide
ccagggtcatgggaggcac

SEQ ID NO: 2461 - DNA, 19 bp, Artificial Sequence
  Description of Artificial Sequence: Synthetic oligonucleotide
cagggtcatgggaggcacc

SEQ ID NO: 2462 - DNA, 19 bp, Artificial Sequence
  Description of Artificial Sequence: Synthetic oligonucleotide
agggtcatgggaggcaccg

SEQ ID NO: 2463 - DNA, 19 bp, Artificial Sequence
  Description of Artificial Sequence: Synthetic oligonucleotide
gggtcatgggaggcaccga

SEQ ID NO: 2464 - DNA, 19 bp, Artificial Sequence
  Description of Artificial Sequence: Synthetic oligonucleotide
ggtcatgggaggcaccgag

SEQ ID NO: 2465 - DNA, 19 bp, Artificial Sequence
  Description of Artificial Sequence: Synthetic oligonucleotide
gtcatgggaggcaccgagt

SEQ ID NO: 2466 - DNA, 19 bp, Artificial Sequence
  Description of Artificial Sequence: Synthetic oligonucleotide
tcatgggaggcaccgagtt

SEQ ID NO: 2467 - DNA, 19 bp, Artificial Sequence
  Description of Artificial Sequence: Synthetic oligonucleotide
catgggaggcaccgagttc

SEQ ID NO: 2468 - DNA, 19 bp, Artificial Sequence
  Description of Artificial Sequence: Synthetic oligonucleotide
atgggaggcaccgagttcg

SEQ ID NO: 2469 - DNA, 19 bp, Artificial Sequence
  Description of Artificial Sequence: Synthetic oligonucleotide
tgggaggcaccgagttcgt

SEQ ID NO: 2470 - DNA, 19 bp, Artificial Sequence
  Description of Artificial Sequence: Synthetic oligonucleotide
gggaggcaccgagttcgtg

SEQ ID NO: 2471 - DNA, 19 bp, Artificial Sequence
  Description of Artificial Sequence: Synthetic oligonucleotide
ggaggcaccgagttcgtgt

SEQ ID NO: 2472 - DNA, 19 bp, Artificial Sequence
  Description of Artificial Sequence: Synthetic oligonucleotide
gaggcaccgagttcgtgtt

SEQ ID NO: 2473 - DNA, 19 bp, Artificial Sequence
  Description of Artificial Sequence: Synthetic oligonucleotide
aggcaccgagttcgtgttc

SEQ ID NO: 2474 - DNA, 19 bp, Artificial Sequence
  Description of Artificial Sequence: Synthetic oligonucleotide
ggcaccgagttcgtgttca

SEQ ID NO: 2475 - DNA, 19 bp, Artificial Sequence
  Description of Artificial Sequence: Synthetic oligonucleotide
gcaccgagttcgtgttcaa

SEQ ID NO: 2476 - DNA, 19 bp, Artificial Sequence
  Description of Artificial Sequence: Synthetic oligonucleotide
caccgagttcgtgttcaaa

SEQ ID NO: 2477 - DNA, 19 bp, Artificial Sequence
  Description of Artificial Sequence: Synthetic oligonucleotide
accgagttcgtgttcaaag

SEQ ID NO: 2478 - DNA, 19 bp, Artificial Sequence
  Description of Artificial Sequence: Synthetic oligonucleotide
ccgagttcgtgttcaaagt

SEQ ID NO: 2479 - DNA, 19 bp, Artificial Sequence
  Description of Artificial Sequence: Synthetic oligonucleotide
cgagttcgtgttcaaagtg

SEQ ID NO: 2480 - DNA, 19 bp, Artificial Sequence
  Description of Artificial Sequence: Synthetic oligonucleotide
gagttcgtgttcaaagtga

SEQ ID NO: 2481 - DNA, 19 bp, Artificial Sequence
  Description of Artificial Sequence: Synthetic oligonucleotide
agttcgtgttcaaagtgaa

SEQ ID NO: 2482 - DNA, 19 bp, Artificial Sequence
  Description of Artificial Sequence: Synthetic oligonucleotide
gttcgtgttcaaagtgaat

SEQ ID NO: 2483 - DNA, 19 bp, Artificial Sequence
  Description of Artificial Sequence: Synthetic oligonucleotide
ttcgtgttcaaagtgaatc

SEQ ID NO: 2484 - DNA, 19 bp, Artificial Sequence
  Description of Artificial Sequence: Synthetic oligonucleotide
tcgtgttcaaagtgaatca

SEQ ID NO: 2485 - DNA, 19 bp, Artificial Sequence
  Description of Artificial Sequence: Synthetic oligonucleotide
cgtgttcaaagtgaatcac

SEQ ID NO: 2486 - DNA, 19 bp, Artificial Sequence
  Description of Artificial Sequence: Synthetic oligonucleotide
gtgttcaaagtgaatcaca

SEQ ID NO: 2487 - DNA, 19 bp, Artificial Sequence
  Description of Artificial Sequence: Synthetic oligonucleotide
tgttcaaagtgaatcacat

SEQ ID NO: 2488 - DNA, 19 bp, Artificial Sequence
  Description of Artificial Sequence: Synthetic oligonucleotide
gttcaaagtgaatcacatg

SEQ ID NO: 2489 - DNA, 19 bp, Artificial Sequence
  Description of Artificial Sequence: Synthetic oligonucleotide
ttcaaagtgaatcacatga

SEQ ID NO: 2490 - DNA, 19 bp, Artificial Sequence
  Description of Artificial Sequence: Synthetic oligonucleotide
tcaaagtgaatcacatgaa

SEQ ID NO: 2491 - DNA, 19 bp, Artificial Sequence
  Description of Artificial Sequence: Synthetic oligonucleotide
caaagtgaatcacatgaag

SEQ ID NO: 2492 - DNA, 19 bp, Artificial Sequence
  Description of Artificial Sequence: Synthetic oligonucleotide
aaagtgaatcacatgaagg

SEQ ID NO: 2493 - DNA, 19 bp, Artificial Sequence
  Description of Artificial Sequence: Synthetic oligonucleotide
aagtgaatcacatgaaggt

SEQ ID NO: 2494 - DNA, 19 bp, Artificial Sequence
  Description of Artificial Sequence: Synthetic oligonucleotide
agtgaatcacatgaaggtc

SEQ ID NO: 2495 - DNA, 19 bp, Artificial Sequence
  Description of Artificial Sequence: Synthetic oligonucleotide
gtgaatcacatgaaggtca

SEQ ID NO: 2496 - DNA, 19 bp, Artificial Sequence
  Description of Artificial Sequence: Synthetic oligonucleotide
tgaatcacatgaaggtcac

SEQ ID NO: 2497 - DNA, 19 bp, Artificial Sequence
  Description of Artificial Sequence: Synthetic oligonucleotide
gaatcacatgaaggtcacc

SEQ ID NO: 2498 - DNA, 19 bp, Artificial Sequence
  Description of Artificial Sequence: Synthetic oligonucleotide
aatcacatgaaggtcaccc

SEQ ID NO: 2499 - DNA, 19 bp, Artificial Sequence
  Description of Artificial Sequence: Synthetic oligonucleotide
atcacatgaaggtcacccc

SEQ ID NO: 2500 - DNA, 19 bp, Artificial Sequence
  Description of Artificial Sequence: Synthetic oligonucleotide
tcacatgaaggtcaccccc

SEQ ID NO: 2501 - DNA, 19 bp, Artificial Sequence
  Description of Artificial Sequence: Synthetic oligonucleotide
cacatgaaggtcaccccca

SEQ ID NO: 2502 - DNA, 19 bp, Artificial Sequence
  Description of Artificial Sequence: Synthetic oligonucleotide
acatgaaggtcacccccat

SEQ ID NO: 2503 - DNA, 19 bp, Artificial Sequence
  Description of Artificial Sequence: Synthetic oligonucleotide
catgaaggtcacccccatg

SEQ ID NO: 2504 - DNA, 19 bp, Artificial Sequence
  Description of Artificial Sequence: Synthetic oligonucleotide
atgaaggtcacccccatgg

SEQ ID NO: 2505 - DNA, 19 bp, Artificial Sequence
  Description of Artificial Sequence: Synthetic oligonucleotide
tgaaggtcacccccatgga

SEQ ID NO: 2506 - DNA, 19 bp, Artificial Sequence
  Description of Artificial Sequence: Synthetic oligonucleotide
gaaggtcacccccatggat

SEQ ID NO: 2507 - DNA, 19 bp, Artificial Sequence
  Description of Artificial Sequence: Synthetic oligonucleotide
aaggtcacccccatggatg

SEQ ID NO: 2508 - DNA, 19 bp, Artificial Sequence
  Description of Artificial Sequence: Synthetic oligonucleotide
aggtcacccccatggatgc

SEQ ID NO: 2509 - DNA, 19 bp, Artificial Sequence
  Description of Artificial Sequence: Synthetic oligonucleotide
ggtcacccccatggatgcg

SEQ ID NO: 2510 - DNA, 19 bp, Artificial Sequence
  Description of Artificial Sequence: Synthetic oligonucleotide
gtcacccccatggatgcgg

SEQ ID NO: 2511 - DNA, 19 bp, Artificial Sequence
  Description of Artificial Sequence: Synthetic oligonucleotide
tcacccccatggatgcggc

SEQ ID NO: 2512 - DNA, 19 bp, Artificial Sequence
  Description of Artificial Sequence: Synthetic oligonucleotide
cacccccatggatgcggcc

SEQ ID NO: 2513 - DNA, 19 bp, Artificial Sequence
  Description of Artificial Sequence: Synthetic oligonucleotide
acccccatggatgcggcca

SEQ ID NO: 2514 - DNA, 19 bp, Artificial Sequence
  Description of Artificial Sequence: Synthetic oligonucleotide
cccccatggatgcggccac

SEQ ID NO: 2515 - DNA, 19 bp, Artificial Sequence
  Description of Artificial Sequence: Synthetic oligonucleotide
ccccatggatgcggccaca

SEQ ID NO: 2516 - DNA, 19 bp, Artificial Sequence
  Description of Artificial Sequence: Synthetic oligonucleotide
cccatggatgcggccacag

SEQ ID NO: 2517 - DNA, 19 bp, Artificial Sequence
  Description of Artificial Sequence: Synthetic oligonucleotide
ccatggatgcggccacagc

SEQ ID NO: 2518 - DNA, 19 bp, Artificial Sequence
  Description of Artificial Sequence: Synthetic oligonucleotide
catggatgcggccacagcc

SEQ ID NO: 2519 - DNA, 19 bp, Artificial Sequence
  Description of Artificial Sequence: Synthetic oligonucleotide
atggatgcggccacagcct

SEQ ID NO: 2520 - DNA, 19 bp, Artificial Sequence
  Description of Artificial Sequence: Synthetic oligonucleotide
tggatgcggccacagcctc

SEQ ID NO: 2521 - DNA, 19 bp, Artificial Sequence
  Description of Artificial Sequence: Synthetic oligonucleotide
ggatgcggccacagcctca

SEQ ID NO: 2522 - DNA, 19 bp, Artificial Sequence
  Description of Artificial Sequence: Synthetic oligonucleotide
gatgcggccacagcctcac

SEQ ID NO: 2523 - DNA, 19 bp, Artificial Sequence
  Description of Artificial Sequence: Synthetic oligonucleotide
atgcggccacagcctcact

SEQ ID NO: 2524 - DNA, 19 bp, Artificial Sequence
  Description of Artificial Sequence: Synthetic oligonucleotide
tgcggccacagcctcactg

SEQ ID NO: 2525 - DNA, 19 bp, Artificial Sequence
  Description of Artificial Sequence: Synthetic oligonucleotide
gcggccacagcctcactgc

SEQ ID NO: 2526 - DNA, 19 bp, Artificial Sequence
  Description of Artificial Sequence: Synthetic oligonucleotide
cggccacagcctcactgct

SEQ ID NO: 2527 - DNA, 19 bp, Artificial Sequence
  Description of Artificial Sequence: Synthetic oligonucleotide
taataataattaagagaaa

SEQ ID NO: 2528 - DNA, 19 bp, Artificial Sequence
  Description of Artificial Sequence: Synthetic oligonucleotide
ttctcttaattattattat

SEQ ID NO: 2529 - DNA, 19 bp, Artificial Sequence
  Description of Artificial Sequence: Synthetic oligonucleotide
tctcttaattattattata

SEQ ID NO: 2530 - DNA, 19 bp, Artificial Sequence
  Description of Artificial Sequence: Synthetic oligonucleotide
ctcttaattattattatat

SEQ ID NO: 2531 - DNA, 19 bp, Artificial Sequence
  Description of Artificial Sequence: Synthetic oligonucleotide
tcttaattattattatatt

SEQ ID NO: 2532 - DNA, 19 bp, Artificial Sequence
  Description of Artificial Sequence: Synthetic oligonucleotide
cttaattattattatattt

SEQ ID NO: 2533 - DNA, 19 bp, Artificial Sequence
  Description of Artificial Sequence: Synthetic oligonucleotide
ttaattattattatatttc

SEQ ID NO: 2534 - DNA, 19 bp, Artificial Sequence
  Description of Artificial Sequence: Synthetic oligonucleotide
taattattattatatttct

SEQ ID NO: 2535 - DNA, 19 bp, Artificial Sequence
  Description of Artificial Sequence: Synthetic oligonucleotide
aattattattatatttctg

SEQ ID NO: 2536 - DNA, 19 bp, Artificial Sequence
  Description of Artificial Sequence: Synthetic oligonucleotide
attattattatatttctga

SEQ ID NO: 2537 - DNA, 19 bp, Artificial Sequence
  Description of Artificial Sequence: Synthetic oligonucleotide
ttattattatatttctgag

SEQ ID NO: 2538 - DNA, 19 bp, Artificial Sequence
  Description of Artificial Sequence: Synthetic oligonucleotide
tattattatatttctgagt

SEQ ID NO: 2539 - DNA, 19 bp, Artificial Sequence
  Description of Artificial Sequence: Synthetic oligonucleotide
attattatatttctgagtt

SEQ ID NO: 2540 - DNA, 19 bp, Artificial Sequence
  Description of Artificial Sequence: Synthetic oligonucleotide
ttattatatttctgagtta

SEQ ID NO: 2541 - DNA, 19 bp, Artificial Sequence
  Description of Artificial Sequence: Synthetic oligonucleotide
tattatatttctgagttaa

SEQ ID NO: 2542 - DNA, 19 bp, Artificial Sequence
  Description of Artificial Sequence: Synthetic oligonucleotide
attatatttctgagttaaa

SEQ ID NO: 2543 - DNA, 19 bp, Artificial Sequence
  Description of Artificial Sequence: Synthetic oligonucleotide
ttatatttctgagttaaac

SEQ ID NO: 2544 - DNA, 19 bp, Artificial Sequence
  Description of Artificial Sequence: Synthetic oligonucleotide
tatatttctgagttaaact

SEQ ID NO: 2545 - DNA, 19 bp, Artificial Sequence
  Description of Artificial Sequence: Synthetic oligonucleotide
atatttctgagttaaactt

SEQ ID NO: 2546 - DNA, 19 bp, Artificial Sequence
  Description of Artificial Sequence: Synthetic oligonucleotide
tatttctgagttaaactta

SEQ ID NO: 2547 - DNA, 19 bp, Artificial Sequence
  Description of Artificial Sequence: Synthetic oligonucleotide
atttctgagttaaacttag

SEQ ID NO: 2548 - DNA, 19 bp, Artificial Sequence
  Description of Artificial Sequence: Synthetic oligonucleotide
tttctgagttaaacttaga

SEQ ID NO: 2549 - DNA, 19 bp, Artificial Sequence
  Description of Artificial Sequence: Synthetic oligonucleotide
ttctgagttaaacttagaa

SEQ ID NO: 2550 - DNA, 19 bp, Artificial Sequence
  Description of Artificial Sequence: Synthetic oligonucleotide
tctgagttaaacttagaag

SEQ ID NO: 2551 - DNA, 19 bp, Artificial Sequence
  Description of Artificial Sequence: Synthetic oligonucleotide
ctgagttaaacttagaaga

SEQ ID NO: 2552 - DNA, 19 bp, Artificial Sequence
  Description of Artificial Sequence: Synthetic oligonucleotide
tgagttaaacttagaagaa

SEQ ID NO: 2553 - DNA, 19 bp, Artificial Sequence
  Description of Artificial Sequence: Synthetic oligonucleotide
gagttaaacttagaagaaa

SEQ ID NO: 2554 - DNA, 19 bp, Artificial Sequence
  Description of Artificial Sequence: Synthetic oligonucleotide
agttaaacttagaagaaac

SEQ ID NO: 2555 - DNA, 19 bp, Artificial Sequence
  Description of Artificial Sequence: Synthetic oligonucleotide
gttaaacttagaagaaaca

SEQ ID NO: 2556 - DNA, 19 bp, Artificial Sequence
  Description of Artificial Sequence: Synthetic oligonucleotide
ttaaacttagaagaaacaa

SEQ ID NO: 2557 - DNA, 19 bp, Artificial Sequence
  Description of Artificial Sequence: Synthetic oligonucleotide
taaacttagaagaaacaac

SEQ ID NO: 2558 - DNA, 19 bp, Artificial Sequence
  Description of Artificial Sequence: Synthetic oligonucleotide
aaacttagaagaaacaact

SEQ ID NO: 2559 - DNA, 19 bp, Artificial Sequence
  Description of Artificial Sequence: Synthetic oligonucleotide
aacttagaagaaacaacta

SEQ ID NO: 2560 - DNA, 19 bp, Artificial Sequence
  Description of Artificial Sequence: Synthetic oligonucleotide
acttagaagaaacaactat

SEQ ID NO: 2561 - DNA, 19 bp, Artificial Sequence
  Description of Artificial Sequence: Synthetic oligonucleotide
cttagaagaaacaactatc

SEQ ID NO: 2562 - DNA, 19 bp, Artificial Sequence
  Description of Artificial Sequence: Synthetic oligonucleotide
ttagaagaaacaactatca

SEQ ID NO: 2563 - DNA, 19 bp, Artificial Sequence
  Description of Artificial Sequence: Synthetic oligonucleotide
tagaagaaacaactatcaa

SEQ ID NO: 2564 - DNA, 19 bp, Artificial Sequence
  Description of Artificial Sequence: Synthetic oligonucleotide
agaagaaacaactatcaag

SEQ ID NO: 2565 - DNA, 19 bp, Artificial Sequence
  Description of Artificial Sequence: Synthetic oligonucleotide
gaagaaacaactatcaagc

SEQ ID NO: 2566 - DNA, 19 bp, Artificial Sequence
  Description of Artificial Sequence: Synthetic oligonucleotide
aagaaacaactatcaagct

SEQ ID NO: 2567 - DNA, 19 bp, Artificial Sequence
  Description of Artificial Sequence: Synthetic oligonucleotide
agaaacaactatcaagcta

SEQ ID NO: 2568 - DNA, 19 bp, Artificial Sequence
  Description of Artificial Sequence: Synthetic oligonucleotide
gaaacaactatcaagctac

SEQ ID NO: 2569 - DNA, 19 bp, Artificial Sequence
  Description of Artificial Sequence: Synthetic oligonucleotide
aaacaactatcaagctaca

SEQ ID NO: 2570 - DNA, 19 bp, Artificial Sequence
  Description of Artificial Sequence: Synthetic oligonucleotide
aacaactatcaagctacaa

SEQ ID NO: 2571 - DNA, 19 bp, Artificial Sequence
  Description of Artificial Sequence: Synthetic oligonucleotide
acaactatcaagctacaac

SEQ ID NO: 2572 - DNA, 19 bp, Artificial Sequence
  Description of Artificial Sequence: Synthetic oligonucleotide
caactatcaagctacaact

SEQ ID NO: 2573 - DNA, 19 bp, Artificial Sequence
  Description of Artificial Sequence: Synthetic oligonucleotide
aactatcaagctacaactt

SEQ ID NO: 2574 - DNA, 19 bp, Artificial Sequence
  Description of Artificial Sequence: Synthetic oligonucleotide
actatcaagctacaacttt

SEQ ID NO: 2575 - DNA, 19 bp, Artificial Sequence
  Description of Artificial Sequence: Synthetic oligonucleotide
ctatcaagctacaactttt

SEQ ID NO: 2576 - DNA, 19 bp, Artificial Sequence
  Description of Artificial Sequence: Synthetic oligonucleotide
tatcaagctacaacttttc

SEQ ID NO: 2577 - DNA, 19 bp, Artificial Sequence
  Description of Artificial Sequence: Synthetic oligonucleotide
atcaagctacaacttttcc

SEQ ID NO: 2578 - DNA, 19 bp, Artificial Sequence
  Description of Artificial Sequence: Synthetic oligonucleotide
tcaagctacaacttttcct

SEQ ID NO: 2579 - DNA, 19 bp, Artificial Sequence
  Description of Artificial Sequence: Synthetic oligonucleotide
caagctacaacttttcctg

SEQ ID NO: 2580 - DNA, 19 bp, Artificial Sequence
  Description of Artificial Sequence: Synthetic oligonucleotide
aagctacaacttttcctgc

SEQ ID NO: 2581 - DNA, 19 bp, Artificial Sequence
  Description of Artificial Sequence: Synthetic oligonucleotide
agctacaacttttcctgcc

SEQ ID NO: 2582 - DNA, 19 bp, Artificial Sequence
  Description of Artificial Sequence: Synthetic oligonucleotide
gctacaacttttcctgcca

SEQ ID NO: 2583 - DNA, 19 bp, Artificial Sequence
  Description of Artificial Sequence: Synthetic oligonucleotide
ctacaacttttcctgccat

SEQ ID NO: 2584 - DNA, 19 bp, Artificial Sequence
  Description of Artificial Sequence: Synthetic oligonucleotide
tacaacttttcctgccatt

SEQ ID NO: 2585 - DNA, 19 bp, Artificial Sequence
  Description of Artificial Sequence: Synthetic oligonucleotide
acaacttttcctgccattt

SEQ ID NO: 2586 - DNA, 19 bp, Artificial Sequence
  Description of Artificial Sequence: Synthetic oligonucleotide
caacttttcctgccatttt

SEQ ID NO: 2587 - DNA, 19 bp, Artificial Sequence
  Description of Artificial Sequence: Synthetic oligonucleotide
aacttttcctgccattttc

SEQ ID NO: 2588 - DNA, 19 bp, Artificial Sequence
  Description of Artificial Sequence: Synthetic oligonucleotide
acttttcctgccattttcc

SEQ ID NO: 2589 - DNA, 19 bp, Artificial Sequence
  Description of Artificial Sequence: Synthetic oligonucleotide
cttttcctgccattttcct

SEQ ID NO: 2590 - DNA, 19 bp, Artificial Sequence
  Description of Artificial Sequence: Synthetic oligonucleotide
ttttcctgccattttcctg

SEQ ID NO: 2591 - DNA, 19 bp, Artificial Sequence
  Description of Artificial Sequence: Synthetic oligonucleotide
tttcctgccattttcctgt

SEQ ID NO: 2592 - DNA, 19 bp, Artificial Sequence
  Description of Artificial Sequence: Synthetic oligonucleotide
ttcctgccattttcctgtg

SEQ ID NO: 2593 - DNA, 19 bp, Artificial Sequence
  Description of Artificial Sequence: Synthetic oligonucleotide
tcctgccattttcctgtgg

SEQ ID NO: 2594 - DNA, 19 bp, Artificial Sequence
  Description of Artificial Sequence: Synthetic oligonucleotide
cctgccattttcctgtggt

SEQ ID NO: 2595 - DNA, 19 bp, Artificial Sequence
  Description of Artificial Sequence: Synthetic oligonucleotide
ctgccattttcctgtggtt

SEQ ID NO: 2596 - DNA, 19 bp, Artificial Sequence
  Description of Artificial Sequence: Synthetic oligonucleotide
tgccattttcctgtggttg

SEQ ID NO: 2597 - DNA, 19 bp, Artificial Sequence
  Description of Artificial Sequence: Synthetic oligonucleotide
gccattttcctgtggttgc

SEQ ID NO: 2598 - DNA, 19 bp, Artificial Sequence
  Description of Artificial Sequence: Synthetic oligonucleotide
ccattttcctgtggttgca

SEQ ID NO: 2599 - DNA, 19 bp, Artificial Sequence
  Description of Artificial Sequence: Synthetic oligonucleotide
cattttcctgtggttgcag

SEQ ID NO: 2600 - DNA, 19 bp, Artificial Sequence
  Description of Artificial Sequence: Synthetic oligonucleotide
attttcctgtggttgcagc

SEQ ID NO: 2601 - DNA, 19 bp, Artificial Sequence
  Description of Artificial Sequence: Synthetic oligonucleotide
ttttcctgtggttgcagcc

SEQ ID NO: 2602 - DNA, 19 bp, Artificial Sequence
  Description of Artificial Sequence: Synthetic oligonucleotide
tttcctgtggttgcagcct

SEQ ID NO: 2603 - DNA, 19 bp, Artificial Sequence
  Description of Artificial Sequence: Synthetic oligonucleotide
ttcctgtggttgcagcctg

SEQ ID NO: 2604 - DNA, 19 bp, Artificial Sequence
  Description of Artificial Sequence: Synthetic oligonucleotide
tcctgtggttgcagcctgt

SEQ ID NO: 2605 - DNA, 19 bp, Artificial Sequence
  Description of Artificial Sequence: Synthetic oligonucleotide
cctgtggttgcagcctgtc

SEQ ID NO: 2606 - DNA, 19 bp, Artificial Sequence
  Description of Artificial Sequence: Synthetic oligonucleotide
ctgtggttgcagcctgtct

SEQ ID NO: 2607 - DNA, 19 bp, Artificial Sequence
  Description of Artificial Sequence: Synthetic oligonucleotide
tgtggttgcagcctgtctt

SEQ ID NO: 2608 - DNA, 19 bp, Artificial Sequence
  Description of Artificial Sequence: Synthetic oligonucleotide
gtggttgcagcctgtcttc

SEQ ID NO: 2609 - DNA, 19 bp, Artificial Sequence
  Description of Artificial Sequence: Synthetic oligonucleotide
tggttgcagcctgtcttcc

SEQ ID NO: 2610 - DNA, 19 bp, Artificial Sequence
  Description of Artificial Sequence: Synthetic oligonucleotide
ggttgcagcctgtcttcct

SEQ ID NO: 2611 - DNA, 19 bp, Artificial Sequence
  Description of Artificial Sequence: Synthetic oligonucleotide
gttgcagcctgtcttcctt

SEQ ID NO: 2612 - DNA, 19 bp, Artificial Sequence
  Description of Artificial Sequence: Synthetic oligonucleotide
ttgcagcctgtcttccttt

SEQ ID NO: 2613 - DNA, 19 bp, Artificial Sequence
  Description of Artificial Sequence: Synthetic oligonucleotide
tgcagcctgtcttcctttg

SEQ ID NO: 2614 - DNA, 19 bp, Artificial Sequence
  Description of Artificial Sequence: Synthetic oligonucleotide
gcagcctgtcttcctttga

SEQ ID NO: 2615 - DNA, 19 bp, Artificial Sequence
  Description of Artificial Sequence: Synthetic oligonucleotide
cagcctgtcttcctttgaa

SEQ ID NO: 2616 - DNA, 19 bp, Artificial Sequence
  Description of Artificial Sequence: Synthetic oligonucleotide
agcctgtcttcctttgaaa

SEQ ID NO: 2617 - DNA, 19 bp, Artificial Sequence
  Description of Artificial Sequence: Synthetic oligonucleotide
gcctgtcttcctttgaaat

SEQ ID NO: 2618 - DNA, 19 bp, Artificial Sequence
  Description of Artificial Sequence: Synthetic oligonucleotide
cctgtcttcctttgaaatt

SEQ ID NO: 2619 - DNA, 19 bp, Artificial Sequence
  Description of Artificial Sequence: Synthetic oligonucleotide
ctgtcttcctttgaaattg

SEQ ID NO: 2620 - DNA, 19 bp, Artificial Sequence
  Description of Artificial Sequence: Synthetic oligonucleotide
tgtcttcctttgaaattgt

SEQ ID NO: 2621 - DNA, 19 bp, Artificial Sequence
  Description of Artificial Sequence: Synthetic oligonucleotide
gtcttcctttgaaattgtt

SEQ ID NO: 2622 - DNA, 19 bp, Artificial Sequence
  Description of Artificial Sequence: Synthetic oligonucleotide
tcttcctttgaaattgttt

SEQ ID NO: 2623 - DNA, 19 bp, Artificial Sequence
  Description of Artificial Sequence: Synthetic oligonucleotide
cttcctttgaaattgtttt

SEQ ID NO: 2624 - DNA, 19 bp, Artificial Sequence
  Description of Artificial Sequence: Synthetic oligonucleotide
ttcctttgaaattgtttta

SEQ ID NO: 2625 - DNA, 19 bp, Artificial Sequence
  Description of Artificial Sequence: Synthetic oligonucleotide
tcctttgaaattgttttac

SEQ ID NO: 2626 - DNA, 19 bp, Artificial Sequence
  Description of Artificial Sequence: Synthetic oligonucleotide
cctttgaaattgttttact

SEQ ID NO: 2627 - DNA, 19 bp, Artificial Sequence
  Description of Artificial Sequence: Synthetic oligonucleotide
ctttgaaattgttttactc

SEQ ID NO: 2628 - DNA, 19 bp, Artificial Sequence
  Description of Artificial Sequence: Synthetic oligonucleotide
tttgaaattgttttactct

SEQ ID NO: 2629 - DNA, 19 bp, Artificial Sequence
  Description of Artificial Sequence: Synthetic oligonucleotide
ttgaaattgttttactctc

SEQ ID NO: 2630 - DNA, 19 bp, Artificial Sequence
  Description of Artificial Sequence: Synthetic oligonucleotide
tgaaattgttttactctct

SEQ ID NO: 2631 - DNA, 19 bp, Artificial Sequence
  Description of Artificial Sequence: Synthetic oligonucleotide
gaaattgttttactctctg

SEQ ID NO: 2632 - DNA, 19 bp, Artificial Sequence
  Description of Artificial Sequence: Synthetic oligonucleotide
aaattgttttactctctga

SEQ ID NO: 2633 - DNA, 19 bp, Artificial Sequence
  Description of Artificial Sequence: Synthetic oligonucleotide
aattgttttactctctgag

SEQ ID NO: 2634 - DNA, 19 bp, Artificial Sequence
  Description of Artificial Sequence: Synthetic oligonucleotide
attgttttactctctgagt

SEQ ID NO: 2635 - DNA, 19 bp, Artificial Sequence
  Description of Artificial Sequence: Synthetic oligonucleotide
ttgttttactctctgagtt

SEQ ID NO: 2636 - DNA, 19 bp, Artificial Sequence
  Description of Artificial Sequence: Synthetic oligonucleotide
tgttttactctctgagttt

SEQ ID NO: 2637 - DNA, 19 bp, Artificial Sequence
  Description of Artificial Sequence: Synthetic oligonucleotide
gttttactctctgagtttt

SEQ ID NO: 2638 - DNA, 19 bp, Artificial Sequence
  Description of Artificial Sequence: Synthetic oligonucleotide
ttttactctctgagtttta

SEQ ID NO: 2639 - DNA, 19 bp, Artificial Sequence
  Description of Artificial Sequence: Synthetic oligonucleotide
tttactctctgagttttat

SEQ ID NO: 2640 - DNA, 19 bp, Artificial Sequence
  Description of Artificial Sequence: Synthetic oligonucleotide
ttactctctgagttttata

SEQ ID NO: 2641 - DNA, 19 bp, Artificial Sequence
  Description of Artificial Sequence: Synthetic oligonucleotide
tactctctgagttttatat

SEQ ID NO: 2642 - DNA, 19 bp, Artificial Sequence
  Description of Artificial Sequence: Synthetic oligonucleotide
actctctgagttttatatg

SEQ ID NO: 2643 - DNA, 19 bp, Artificial Sequence
  Description of Artificial Sequence: Synthetic oligonucleotide
ctctctgagttttatatgc

SEQ ID NO: 2644 - DNA, 19 bp, Artificial Sequence
  Description of Artificial Sequence: Synthetic oligonucleotide
tctctgagttttatatgct

SEQ ID NO: 2645 - DNA, 19 bp, Artificial Sequence
  Description of Artificial Sequence: Synthetic oligonucleotide
ctctgagttttatatgctg

SEQ ID NO: 2646 - DNA, 19 bp, Artificial Sequence
  Description of Artificial Sequence: Synthetic oligonucleotide
tctgagttttatatgctgg

SEQ ID NO: 2647 - DNA, 19 bp, Artificial Sequence
  Description of Artificial Sequence: Synthetic oligonucleotide
ctgagttttatatgctgga

SEQ ID NO: 2648 - DNA, 19 bp, Artificial Sequence
  Description of Artificial Sequence: Synthetic oligonucleotide
tgagttttatatgctggaa

SEQ ID NO: 2649 - DNA, 19 bp, Artificial Sequence
  Description of Artificial Sequence: Synthetic oligonucleotide
gagttttatatgctggaat

SEQ ID NO: 2650 - DNA, 19 bp, Artificial Sequence
  Description of Artificial Sequence: Synthetic oligonucleotide
agttttatatgctggaatc

SEQ ID NO: 2651 - DNA, 19 bp, Artificial Sequence
  Description of Artificial Sequence: Synthetic oligonucleotide
gttttatatgctggaatcc

SEQ ID NO: 2652 - DNA, 19 bp, Artificial Sequence
  Description of Artificial Sequence: Synthetic oligonucleotide
ttttatatgctggaatcca

SEQ ID NO: 2653 - DNA, 19 bp, Artificial Sequence
  Description of Artificial Sequence: Synthetic oligonucleotide
tttatatgctggaatccaa

SEQ ID NO: 2654 - DNA, 19 bp, Artificial Sequence
  Description of Artificial Sequence: Synthetic oligonucleotide
ttatatgctggaatccaat

SEQ ID NO: 2655 - DNA, 19 bp, Artificial Sequence
  Description of Artificial Sequence: Synthetic oligonucleotide
tatatgctggaatccaatg

SEQ ID NO: 2656 - DNA, 19 bp, Artificial Sequence
  Description of Artificial Sequence: Synthetic oligonucleotide
atatgctggaatccaatgc

SEQ ID NO: 2657 - DNA, 19 bp, Artificial Sequence
  Description of Artificial Sequence: Synthetic oligonucleotide
tatgctggaatccaatgca

SEQ ID NO: 2658 - DNA, 19 bp, Artificial Sequence
  Description of Artificial Sequence: Synthetic oligonucleotide
atgctggaatccaatgcag

SEQ ID NO: 2659 - DNA, 19 bp, Artificial Sequence
  Description of Artificial Sequence: Synthetic oligonucleotide
tgctggaatccaatgcaga

SEQ ID NO: 2660 - DNA, 19 bp, Artificial Sequence
  Description of Artificial Sequence: Synthetic oligonucleotide
gctggaatccaatgcagag

SEQ ID NO: 2661 - DNA, 19 bp, Artificial Sequence
  Description of Artificial Sequence: Synthetic oligonucleotide
ctggaatccaatgcagagt

SEQ ID NO: 2662 - DNA, 19 bp, Artificial Sequence
  Description of Artificial Sequence: Synthetic oligonucleotide
tggaatccaatgcagagtt

SEQ ID NO: 2663 - DNA, 19 bp, Artificial Sequence
  Description of Artificial Sequence: Synthetic oligonucleotide
ggaatccaatgcagagttg

SEQ ID NO: 2664 - DNA, 19 bp, Artificial Sequence
  Description of Artificial Sequence: Synthetic oligonucleotide
gaatccaatgcagagttgg

SEQ ID NO: 2665 - DNA, 19 bp, Artificial Sequence
  Description of Artificial Sequence: Synthetic oligonucleotide
aatccaatgcagagttggt

SEQ ID NO: 2666 - DNA, 19 bp, Artificial Sequence
  Description of Artificial Sequence: Synthetic oligonucleotide
atccaatgcagagttggtt

SEQ ID NO: 2667 - DNA, 19 bp, Artificial Sequence
  Description of Artificial Sequence: Synthetic oligonucleotide
tccaatgcagagttggttt

SEQ ID NO: 2668 - DNA, 19 bp, Artificial Sequence
  Description of Artificial Sequence: Synthetic oligonucleotide
ccaatgcagagttggtttg

SEQ ID NO: 2669 - DNA, 19 bp, Artificial Sequence
  Description of Artificial Sequence: Synthetic oligonucleotide
caatgcagagttggtttgg

SEQ ID NO: 2670 - DNA, 19 bp, Artificial Sequence
  Description of Artificial Sequence: Synthetic oligonucleotide
aatgcagagttggtttggg

SEQ ID NO: 2671 - DNA, 19 bp, Artificial Sequence
  Description of Artificial Sequence: Synthetic oligonucleotide
atgcagagttggtttggga

SEQ ID NO: 2672 - DNA, 19 bp, Artificial Sequence
  Description of Artificial Sequence: Synthetic oligonucleotide
tgcagagttggtttgggac

SEQ ID NO: 2673 - DNA, 19 bp, Artificial Sequence
  Description of Artificial Sequence: Synthetic oligonucleotide
gcagagttggtttgggact

SEQ ID NO: 2674 - DNA, 19 bp, Artificial Sequence
  Description of Artificial Sequence: Synthetic oligonucleotide
cagagttggtttgggactg

SEQ ID NO: 2675 - DNA, 19 bp, Artificial Sequence
  Description of Artificial Sequence: Synthetic oligonucleotide
agagttggtttgggactgt

SEQ ID NO: 2676 - DNA, 19 bp, Artificial Sequence
  Description of Artificial Sequence: Synthetic oligonucleotide
gagttggtttgggactgtg

SEQ ID NO: 2677 - DNA, 19 bp, Artificial Sequence
  Description of Artificial Sequence: Synthetic oligonucleotide
agttggtttgggactgtga

SEQ ID NO: 2678 - DNA, 19 bp, Artificial Sequence
  Description of Artificial Sequence: Synthetic oligonucleotide
gttggtttgggactgtgat

SEQ ID NO: 2679 - DNA, 19 bp, Artificial Sequence
  Description of Artificial Sequence: Synthetic oligonucleotide
ttggtttgggactgtgatc

SEQ ID NO: 2680 - DNA, 19 bp, Artificial Sequence
  Description of Artificial Sequence: Synthetic oligonucleotide
tggtttgggactgtgatca

SEQ ID NO: 2681 - DNA, 19 bp, Artificial Sequence
  Description of Artificial Sequence: Synthetic oligonucleotide
ggtttgggactgtgatcaa

SEQ ID NO: 2682 - DNA, 19 bp, Artificial Sequence
  Description of Artificial Sequence: Synthetic oligonucleotide
gtttgggactgtgatcaag

SEQ ID NO: 2683 - DNA, 19 bp, Artificial Sequence
  Description of Artificial Sequence: Synthetic oligonucleotide
tttgggactgtgatcaaga

SEQ ID NO: 2684 - DNA, 19 bp, Artificial Sequence
  Description of Artificial Sequence: Synthetic oligonucleotide
ttgggactgtgatcaagac

SEQ ID NO: 2685 - DNA, 19 bp, Artificial Sequence
  Description of Artificial Sequence: Synthetic oligonucleotide
tgggactgtgatcaagaca

SEQ ID NO: 2686 - DNA, 19 bp, Artificial Sequence
  Description of Artificial Sequence: Synthetic oligonucleotide
gggactgtgatcaagacac

SEQ ID NO: 2687 - DNA, 19 bp, Artificial Sequence
  Description of Artificial Sequence: Synthetic oligonucleotide
ggactgtgatcaagacacc

SEQ ID NO: 2688 - DNA, 19 bp, Artificial Sequence
  Description of Artificial Sequence: Synthetic oligonucleotide
gactgtgatcaagacacct

SEQ ID NO: 2689 - DNA, 19 bp, Artificial Sequence
  Description of Artificial Sequence: Synthetic oligonucleotide
actgtgatcaagacacctt

SEQ ID NO: 2690 - DNA, 19 bp, Artificial Sequence
  Description of Artificial Sequence: Synthetic oligonucleotide
ctgtgatcaagacaccttt

SEQ ID NO: 2691 - DNA, 19 bp, Artificial Sequence
  Description of Artificial Sequence: Synthetic oligonucleotide
tgtgatcaagacacctttt

SEQ ID NO: 2692 - DNA, 19 bp, Artificial Sequence
  Description of Artificial Sequence: Synthetic oligonucleotide
gtgatcaagacacctttta

SEQ ID NO: 2693 - DNA, 19 bp, Artificial Sequence
  Description of Artificial Sequence: Synthetic oligonucleotide
tgatcaagacaccttttat

SEQ ID NO: 2694 - DNA, 19 bp, Artificial Sequence
  Description of Artificial Sequence: Synthetic oligonucleotide
gatcaagacaccttttatt

SEQ ID NO: 2695 - DNA, 19 bp, Artificial Sequence
  Description of Artificial Sequence: Synthetic oligonucleotide
atcaagacaccttttatta

SEQ ID NO: 2696 - DNA, 19 bp, Artificial Sequence
  Description of Artificial Sequence: Synthetic oligonucleotide
tcaagacaccttttattaa

SEQ ID NO: 2697 - DNA, 19 bp, Artificial Sequence
  Description of Artificial Sequence: Synthetic oligonucleotide
caagacaccttttattaat

SEQ ID NO: 2698 - DNA, 19 bp, Artificial Sequence
  Description of Artificial Sequence: Synthetic oligonucleotide
aagacaccttttattaata

SEQ ID NO: 2699 - DNA, 19 bp, Artificial Sequence
  Description of Artificial Sequence: Synthetic oligonucleotide
agacaccttttattaataa

SEQ ID NO: 2700 - DNA, 19 bp, Artificial Sequence
  Description of Artificial Sequence: Synthetic oligonucleotide
gacaccttttattaataaa

SEQ ID NO: 2701 - DNA, 19 bp, Artificial Sequence
  Description of Artificial Sequence: Synthetic oligonucleotide
acaccttttattaataaag

SEQ ID NO: 2702 - DNA, 19 bp, Artificial Sequence
  Description of Artificial Sequence: Synthetic oligonucleotide
caccttttattaataaaga

SEQ ID NO: 2703 - DNA, 19 bp, Artificial Sequence
  Description of Artificial Sequence: Synthetic oligonucleotide
accttttattaataaagaa

SEQ ID NO: 2704 - DNA, 19 bp, Artificial Sequence
  Description of Artificial Sequence: Synthetic oligonucleotide
ccttttattaataaagaag

SEQ ID NO: 2705 - DNA, 19 bp, Artificial Sequence
  Description of Artificial Sequence: Synthetic oligonucleotide
cttttattaataaagaaga

SEQ ID NO: 2706 - DNA, 19 bp, Artificial Sequence
  Description of Artificial Sequence: Synthetic oligonucleotide
ttttattaataaagaagag

SEQ ID NO: 2707 - DNA, 19 bp, Artificial Sequence
  Description of Artificial Sequence: Synthetic oligonucleotide
tttattaataaagaagaga

SEQ ID NO: 2708 - DNA, 19 bp, Artificial Sequence
  Description of Artificial Sequence: Synthetic oligonucleotide
ttattaataaagaagagac

SEQ ID NO: 2709 - DNA, 19 bp, Artificial Sequence
  Description of Artificial Sequence: Synthetic oligonucleotide
tattaataaagaagagaca

SEQ ID NO: 2710 - DNA, 19 bp, Artificial Sequence
  Description of Artificial Sequence: Synthetic oligonucleotide
attaataaagaagagacac

SEQ ID NO: 2711 - DNA, 19 bp, Artificial Sequence
  Description of Artificial Sequence: Synthetic oligonucleotide
ttaataaagaagagacaca

SEQ ID NO: 2712 - DNA, 19 bp, Artificial Sequence
  Description of Artificial Sequence: Synthetic oligonucleotide
taataaagaagagacacag

SEQ ID NO: 2713 - DNA, 19 bp, Artificial Sequence
  Description of Artificial Sequence: Synthetic oligonucleotide
aataaagaagagacacagg

SEQ ID NO: 2714 - DNA, 19 bp, Artificial Sequence
  Description of Artificial Sequence: Synthetic oligonucleotide
ataaagaagagacacaggt

SEQ ID NO: 2715 - DNA, 19 bp, Artificial Sequence
  Description of Artificial Sequence: Synthetic oligonucleotide
taaagaagagacacaggtg

SEQ ID NO: 2716 - DNA, 19 bp, Artificial Sequence
  Description of Artificial Sequence: Synthetic oligonucleotide
aaagaagagacacaggtgt

SEQ ID NO: 2717 - DNA, 19 bp, Artificial Sequence
  Description of Artificial Sequence: Synthetic oligonucleotide
aagaagagacacaggtgta

SEQ ID NO: 2718 - DNA, 19 bp, Artificial Sequence
  Description of Artificial Sequence: Synthetic oligonucleotide
agaagagacacaggtgtag

SEQ ID NO: 2719 - DNA, 19 bp, Artificial Sequence
  Description of Artificial Sequence: Synthetic oligonucleotide
gaagagacacaggtgtaga

SEQ ID NO: 2720 - DNA, 19 bp, Artificial Sequence
  Description of Artificial Sequence: Synthetic oligonucleotide
aagagacacaggtgtagat

SEQ ID NO: 2721 - DNA, 19 bp, Artificial Sequence
  Description of Artificial Sequence: Synthetic oligonucleotide
agagacacaggtgtagata

SEQ ID NO: 2722 - DNA, 19 bp, Artificial Sequence
  Description of Artificial Sequence: Synthetic oligonucleotide
gagacacaggtgtagatat

SEQ ID NO: 2723 - DNA, 19 bp, Artificial Sequence
  Description of Artificial Sequence: Synthetic oligonucleotide
agacacaggtgtagatatg

SEQ ID NO: 2724 - DNA, 19 bp, Artificial Sequence
  Description of Artificial Sequence: Synthetic oligonucleotide
gacacaggtgtagatatgt

SEQ ID NO: 2725 - DNA, 19 bp, Artificial Sequence
  Description of Artificial Sequence: Synthetic oligonucleotide
acacaggtgtagatatgta

SEQ ID NO: 2726 - DNA, 19 bp, Artificial Sequence
  Description of Artificial Sequence: Synthetic oligonucleotide
cacaggtgtagatatgtat

SEQ ID NO: 2727 - DNA, 19 bp, Artificial Sequence
  Description of Artificial Sequence: Synthetic oligonucleotide
acaggtgtagatatgtata

SEQ ID NO: 2728 - DNA, 19 bp, Artificial Sequence
  Description of Artificial Sequence: Synthetic oligonucleotide
caggtgtagatatgtatat

SEQ ID NO: 2729 - DNA, 19 bp, Artificial Sequence
  Description of Artificial Sequence: Synthetic oligonucleotide
aggtgtagatatgtatata

SEQ ID NO: 2730 - DNA, 19 bp, Artificial Sequence
  Description of Artificial Sequence: Synthetic oligonucleotide
ggtgtagatatgtatatac

SEQ ID NO: 2731 - DNA, 19 bp, Artificial Sequence
  Description of Artificial Sequence: Synthetic oligonucleotide
gtgtagatatgtatataca

SEQ ID NO: 2732 - DNA, 19 bp, Artificial Sequence
  Description of Artificial Sequence: Synthetic oligonucleotide
tgtagatatgtatatacaa

SEQ ID NO: 2733 - DNA, 19 bp, Artificial Sequence
  Description of Artificial Sequence: Synthetic oligonucleotide
gtagatatgtatatacaaa

SEQ ID NO: 2734 - DNA, 19 bp, Artificial Sequence
  Description of Artificial Sequence: Synthetic oligonucleotide
tagatatgtatatacaaaa

SEQ ID NO: 2735 - DNA, 19 bp, Artificial Sequence
  Description of Artificial Sequence: Synthetic oligonucleotide
agatatgtatatacaaaaa

SEQ ID NO: 2736 - DNA, 19 bp, Artificial Sequence
  Description of Artificial Sequence: Synthetic oligonucleotide
gatatgtatatacaaaaag

SEQ ID NO: 2737 - DNA, 19 bp, Artificial Sequence
  Description of Artificial Sequence: Synthetic oligonucleotide
atatgtatatacaaaaaga

SEQ ID NO: 2738 - DNA, 19 bp, Artificial Sequence
  Description of Artificial Sequence: Synthetic oligonucleotide
tatgtatatacaaaaagat

SEQ ID NO: 2739 - DNA, 19 bp, Artificial Sequence
  Description of Artificial Sequence: Synthetic oligonucleotide
atgtatatacaaaaagatg

SEQ ID NO: 2740 - DNA, 19 bp, Artificial Sequence
  Description of Artificial Sequence: Synthetic oligonucleotide
tgtatatacaaaaagatgt

SEQ ID NO: 2741 - DNA, 19 bp, Artificial Sequence
  Description of Artificial Sequence: Synthetic oligonucleotide
gtatatacaaaaagatgta

SEQ ID NO: 2742 - DNA, 19 bp, Artificial Sequence
  Description of Artificial Sequence: Synthetic oligonucleotide
tatatacaaaaagatgtac

SEQ ID NO: 2743 - DNA, 19 bp, Artificial Sequence
  Description of Artificial Sequence: Synthetic oligonucleotide
atatacaaaaagatgtacg

SEQ ID NO: 2744 - DNA, 19 bp, Artificial Sequence
  Description of Artificial Sequence: Synthetic oligonucleotide
tatacaaaaagatgtacgg

SEQ ID NO: 2745 - DNA, 19 bp, Artificial Sequence
  Description of Artificial Sequence: Synthetic oligonucleotide
atacaaaaagatgtacggt

SEQ ID NO: 2746 - DNA, 19 bp, Artificial Sequence
  Description of Artificial Sequence: Synthetic oligonucleotide
tacaaaaagatgtacggtc

SEQ ID NO: 2747 - DNA, 19 bp, Artificial Sequence
  Description of Artificial Sequence: Synthetic oligonucleotide
acaaaaagatgtacggtct

SEQ ID NO: 2748 - DNA, 19 bp, Artificial Sequence
  Description of Artificial Sequence: Synthetic oligonucleotide
caaaaagatgtacggtctg

SEQ ID NO: 2749 - DNA, 19 bp, Artificial Sequence
  Description of Artificial Sequence: Synthetic oligonucleotide
aaaaagatgtacggtctgg

SEQ ID NO: 2750 - DNA, 19 bp, Artificial Sequence
  Description of Artificial Sequence: Synthetic oligonucleotide
aaaagatgtacggtctggc

SEQ ID NO: 2751 - DNA, 19 bp, Artificial Sequence
  Description of Artificial Sequence: Synthetic oligonucleotide
aaagatgtacggtctggcc

SEQ ID NO: 2752 - DNA, 19 bp, Artificial Sequence
  Description of Artificial Sequence: Synthetic oligonucleotide
aagatgtacggtctggcca

SEQ ID NO: 2753 - DNA, 19 bp, Artificial Sequence
  Description of Artificial Sequence: Synthetic oligonucleotide
agatgtacggtctggccaa

SEQ ID NO: 2754 - DNA, 19 bp, Artificial Sequence
  Description of Artificial Sequence: Synthetic oligonucleotide
gatgtacggtctggccaaa

SEQ ID NO: 2755 - DNA, 19 bp, Artificial Sequence
  Description of Artificial Sequence: Synthetic oligonucleotide
atgtacggtctggccaaac

SEQ ID NO: 2756 - DNA, 19 bp, Artificial Sequence
  Description of Artificial Sequence: Synthetic oligonucleotide
tgtacggtctggccaaacc

SEQ ID NO: 2757 - DNA, 19 bp, Artificial Sequence
  Description of Artificial Sequence: Synthetic oligonucleotide
gtacggtctggccaaacca

SEQ ID NO: 2758 - DNA, 19 bp, Artificial Sequence
  Description of Artificial Sequence: Synthetic oligonucleotide
tacggtctggccaaaccac

SEQ ID NO: 2759 - DNA, 19 bp, Artificial Sequence
  Description of Artificial Sequence: Synthetic oligonucleotide
acggtctggccaaaccacc

SEQ ID NO: 2760 - DNA, 19 bp, Artificial Sequence
  Description of Artificial Sequence: Synthetic oligonucleotide
cggtctggccaaaccacct

SEQ ID NO: 2761 - DNA, 19 bp, Artificial Sequence
  Description of Artificial Sequence: Synthetic oligonucleotide
ggtctggccaaaccacctt

SEQ ID NO: 2762 - DNA, 19 bp, Artificial Sequence
  Description of Artificial Sequence: Synthetic oligonucleotide
gtctggccaaaccaccttc

SEQ ID NO: 2763 - DNA, 19 bp, Artificial Sequence
  Description of Artificial Sequence: Synthetic oligonucleotide
tctggccaaaccaccttcc

SEQ ID NO: 2764 - DNA, 19 bp, Artificial Sequence
  Description of Artificial Sequence: Synthetic oligonucleotide
ctggccaaaccaccttccc

SEQ ID NO: 2765 - DNA, 19 bp, Artificial Sequence
  Description of Artificial Sequence: Synthetic oligonucleotide
tggccaaaccaccttccca

SEQ ID NO: 2766 - DNA, 19 bp, Artificial Sequence
  Description of Artificial Sequence: Synthetic oligonucleotide
ggccaaaccaccttcccag

SEQ ID NO: 2767 - DNA, 19 bp, Artificial Sequence
  Description of Artificial Sequence: Synthetic oligonucleotide
gccaaaccaccttcccagc

SEQ ID NO: 2768 - DNA, 19 bp, Artificial Sequence
  Description of Artificial Sequence: Synthetic oligonucleotide
ccaaaccaccttcccagcc

SEQ ID NO: 2769 - DNA, 19 bp, Artificial Sequence
  Description of Artificial Sequence: Synthetic oligonucleotide
caaaccaccttcccagcct

SEQ ID NO: 2770 - DNA, 19 bp, Artificial Sequence
  Description of Artificial Sequence: Synthetic oligonucleotide
aaaccaccttcccagcctt

SEQ ID NO: 2771 - DNA, 19 bp, Artificial Sequence
  Description of Artificial Sequence: Synthetic oligonucleotide
aaccaccttcccagccttt

SEQ ID NO: 2772 - DNA, 19 bp, Artificial Sequence
  Description of Artificial Sequence: Synthetic oligonucleotide
accaccttcccagccttta

SEQ ID NO: 2773 - DNA, 19 bp, Artificial Sequence
  Description of Artificial Sequence: Synthetic oligonucleotide
ccaccttcccagcctttat

SEQ ID NO: 2774 - DNA, 19 bp, Artificial Sequence
  Description of Artificial Sequence: Synthetic oligonucleotide
caccttcccagcctttatg

SEQ ID NO: 2775 - DNA, 19 bp, Artificial Sequence
  Description of Artificial Sequence: Synthetic oligonucleotide
accttcccagcctttatgc

SEQ ID NO: 2776 - DNA, 19 bp, Artificial Sequence
  Description of Artificial Sequence: Synthetic oligonucleotide
ccttcccagcctttatgca

SEQ ID NO: 2777 - DNA, 19 bp, Artificial Sequence
  Description of Artificial Sequence: Synthetic oligonucleotide
cttcccagcctttatgcaa

SEQ ID NO: 2778 - DNA, 19 bp, Artificial Sequence
  Description of Artificial Sequence: Synthetic oligonucleotide
ttcccagcctttatgcaaa

SEQ ID NO: 2779 - DNA, 19 bp, Artificial Sequence
  Description of Artificial Sequence: Synthetic oligonucleotide
tcccagcctttatgcaaaa

SEQ ID NO: 2780 - DNA, 19 bp, Artificial Sequence
  Description of Artificial Sequence: Synthetic oligonucleotide
cccagcctttatgcaaaaa

SEQ ID NO: 2781 - DNA, 19 bp, Artificial Sequence
  Description of Artificial Sequence: Synthetic oligonucleotide
ccagcctttatgcaaaaaa

SEQ ID NO: 2782 - DNA, 19 bp, Artificial Sequence
  Description of Artificial Sequence: Synthetic oligonucleotide
cagcctttatgcaaaaaaa

SEQ ID NO: 2783 - DNA, 19 bp, Artificial Sequence
  Description of Artificial Sequence: Synthetic oligonucleotide
agcctttatgcaaaaaaag

SEQ ID NO: 2784 - DNA, 19 bp, Artificial Sequence
  Description of Artificial Sequence: Synthetic oligonucleotide
gcctttatgcaaaaaaagg

SEQ ID NO: 2785 - DNA, 19 bp, Artificial Sequence
  Description of Artificial Sequence: Synthetic oligonucleotide
cctttatgcaaaaaaaggg

SEQ ID NO: 2786 - DNA, 19 bp, Artificial Sequence
  Description of Artificial Sequence: Synthetic oligonucleotide
ctttatgcaaaaaaagggg

SEQ ID NO: 2787 - DNA, 19 bp, Artificial Sequence
  Description of Artificial Sequence: Synthetic oligonucleotide
tttatgcaaaaaaagggga

SEQ ID NO: 2788 - DNA, 19 bp, Artificial Sequence
  Description of Artificial Sequence: Synthetic oligonucleotide
ttatgcaaaaaaaggggag

SEQ ID NO: 2789 - DNA, 19 bp, Artificial Sequence
  Description of Artificial Sequence: Synthetic oligonucleotide
tatgcaaaaaaaggggaga

SEQ ID NO: 2790 - DNA, 19 bp, Artificial Sequence
  Description of Artificial Sequence: Synthetic oligonucleotide
atgcaaaaaaaggggagaa

SEQ ID NO: 2791 - DNA, 19 bp, Artificial Sequence
  Description of Artificial Sequence: Synthetic oligonucleotide
tgcaaaaaaaggggagaat

SEQ ID NO: 2792 - DNA, 19 bp, Artificial Sequence
  Description of Artificial Sequence: Synthetic oligonucleotide
gcaaaaaaaggggagaatc

SEQ ID NO: 2793 - DNA, 19 bp, Artificial Sequence
  Description of Artificial Sequence: Synthetic oligonucleotide
caaaaaaaggggagaatca

SEQ ID NO: 2794 - DNA, 19 bp, Artificial Sequence
  Description of Artificial Sequence: Synthetic oligonucleotide
aaaaaaaggggagaatcaa

SEQ ID NO: 2795 - DNA, 19 bp, Artificial Sequence
  Description of Artificial Sequence: Synthetic oligonucleotide
aaaaaaggggagaatcaaa

SEQ ID NO: 2796 - DNA, 19 bp, Artificial Sequence
  Description of Artificial Sequence: Synthetic oligonucleotide
aaaaaggggagaatcaaag

SEQ ID NO: 2797 - DNA, 19 bp, Artificial Sequence
  Description of Artificial Sequence: Synthetic oligonucleotide
aaaaggggagaatcaaagc

SEQ ID NO: 2798 - DNA, 19 bp, Artificial Sequence
  Description of Artificial Sequence: Synthetic oligonucleotide
aaaggggagaatcaaagct

SEQ ID NO: 2799 - DNA, 19 bp, Artificial Sequence
  Description of Artificial Sequence: Synthetic oligonucleotide
aaggggagaatcaaagctt

SEQ ID NO: 2800 - DNA, 19 bp, Artificial Sequence
  Description of Artificial Sequence: Synthetic oligonucleotide
aggggagaatcaaagcttt

SEQ ID NO: 2801 - DNA, 19 bp, Artificial Sequence
  Description of Artificial Sequence: Synthetic oligonucleotide
ggggagaatcaaagctttc

SEQ ID NO: 2802 - DNA, 19 bp, Artificial Sequence
  Description of Artificial Sequence: Synthetic oligonucleotide
gggagaatcaaagctttca

SEQ ID NO: 2803 - DNA, 19 bp, Artificial Sequence
  Description of Artificial Sequence: Synthetic oligonucleotide
ggagaatcaaagctttcat

SEQ ID NO: 2804 - DNA, 19 bp, Artificial Sequence
  Description of Artificial Sequence: Synthetic oligonucleotide
gagaatcaaagctttcatt

SEQ ID NO: 2805 - DNA, 19 bp, Artificial Sequence
  Description of Artificial Sequence: Synthetic oligonucleotide
agaatcaaagctttcattt

SEQ ID NO: 2806 - DNA, 19 bp, Artificial Sequence
  Description of Artificial Sequence: Synthetic oligonucleotide
gaatcaaagctttcatttc

SEQ ID NO: 2807 - DNA, 19 bp, Artificial Sequence
  Description of Artificial Sequence: Synthetic oligonucleotide
aatcaaagctttcatttca

SEQ ID NO: 2808 - DNA, 19 bp, Artificial Sequence
  Description of Artificial Sequence: Synthetic oligonucleotide
atcaaagctttcatttcag

SEQ ID NO: 2809 - DNA, 19 bp, Artificial Sequence
  Description of Artificial Sequence: Synthetic oligonucleotide
tcaaagctttcatttcaga

SEQ ID NO: 2810 - DNA, 19 bp, Artificial Sequence
  Description of Artificial Sequence: Synthetic oligonucleotide
caaagctttcatttcagaa

SEQ ID NO: 2811 - DNA, 19 bp, Artificial Sequence
  Description of Artificial Sequence: Synthetic oligonucleotide
aaagctttcatttcagaaa

SEQ ID NO: 2812 - DNA, 19 bp, Artificial Sequence
  Description of Artificial Sequence: Synthetic oligonucleotide
aagctttcatttcagaaat

SEQ ID NO: 2813 - DNA, 19 bp, Artificial Sequence
  Description of Artificial Sequence: Synthetic oligonucleotide
agctttcatttcagaaatg

SEQ ID NO: 2814 - DNA, 19 bp, Artificial Sequence
  Description of Artificial Sequence: Synthetic oligonucleotide
gctttcatttcagaaatgt

SEQ ID NO: 2815 - DNA, 19 bp, Artificial Sequence
  Description of Artificial Sequence: Synthetic oligonucleotide
ctttcatttcagaaatgtt

SEQ ID NO: 2816 - DNA, 19 bp, Artificial Sequence
  Description of Artificial Sequence: Synthetic oligonucleotide
tttcatttcagaaatgttg

SEQ ID NO: 2817 - DNA, 19 bp, Artificial Sequence
  Description of Artificial Sequence: Synthetic oligonucleotide
ttcatttcagaaatgttgc

SEQ ID NO: 2818 - DNA, 19 bp, Artificial Sequence
  Description of Artificial Sequence: Synthetic oligonucleotide
tcatttcagaaatgttgcg

SEQ ID NO: 2819 - DNA, 19 bp, Artificial Sequence
  Description of Artificial Sequence: Synthetic oligonucleotide
catttcagaaatgttgcgt

SEQ ID NO: 2820 - DNA, 19 bp, Artificial Sequence
  Description of Artificial Sequence: Synthetic oligonucleotide
atttcagaaatgttgcgtg

SEQ ID NO: 2821 - DNA, 19 bp, Artificial Sequence
  Description of Artificial Sequence: Synthetic oligonucleotide
tttcagaaatgttgcgtgg

SEQ ID NO: 2822 - DNA, 19 bp, Artificial Sequence
  Description of Artificial Sequence: Synthetic oligonucleotide
ttcagaaatgttgcgtgga

SEQ ID NO: 2823 - DNA, 19 bp, Artificial Sequence
  Description of Artificial Sequence: Synthetic oligonucleotide
tcagaaatgttgcgtggaa

SEQ ID NO: 2824 - DNA, 19 bp, Artificial Sequence
  Description of Artificial Sequence: Synthetic oligonucleotide
cagaaatgttgcgtggaaa

SEQ ID NO: 2825 - DNA, 19 bp, Artificial Sequence
  Description of Artificial Sequence: Synthetic oligonucleotide
agaaatgttgcgtggaaaa

SEQ ID NO: 2826 - DNA, 19 bp, Artificial Sequence
  Description of Artificial Sequence: Synthetic oligonucleotide
gaaatgttgcgtggaaaag

SEQ ID NO: 2827 - DNA, 19 bp, Artificial Sequence
  Description of Artificial Sequence: Synthetic oligonucleotide
aaatgttgcgtggaaaagt

SEQ ID NO: 2828 - DNA, 19 bp, Artificial Sequence
  Description of Artificial Sequence: Synthetic oligonucleotide
aatgttgcgtggaaaagta

SEQ ID NO: 2829 - DNA, 19 bp, Artificial Sequence
  Description of Artificial Sequence: Synthetic oligonucleotide
atgttgcgtggaaaagtat

SEQ ID NO: 2830 - DNA, 19 bp, Artificial Sequence
  Description of Artificial Sequence: Synthetic oligonucleotide
tgttgcgtggaaaagtatc

SEQ ID NO: 2831 - DNA, 19 bp, Artificial Sequence
  Description of Artificial Sequence: Synthetic oligonucleotide
gttgcgtggaaaagtatct

SEQ ID NO: 2832 - DNA, 19 bp, Artificial Sequence
  Description of Artificial Sequence: Synthetic oligonucleotide
ttgcgtggaaaagtatctg

SEQ ID NO: 2833 - DNA, 19 bp, Artificial Sequence
  Description of Artificial Sequence: Synthetic oligonucleotide
tgcgtggaaaagtatctgt

SEQ ID NO: 2834 - DNA, 19 bp, Artificial Sequence
  Description of Artificial Sequence: Synthetic oligonucleotide
gcgtggaaaagtatctgta

SEQ ID NO: 2835 - DNA, 19 bp, Artificial Sequence
  Description of Artificial Sequence: Synthetic oligonucleotide
cgtggaaaagtatctgtaa

SEQ ID NO: 2836 - DNA, 19 bp, Artificial Sequence
  Description of Artificial Sequence: Synthetic oligonucleotide
gtggaaaagtatctgtaat

SEQ ID NO: 2837 - DNA, 19 bp, Artificial Sequence
  Description of Artificial Sequence: Synthetic oligonucleotide
tggaaaagtatctgtaatt

SEQ ID NO: 2838 - DNA, 19 bp, Artificial Sequence
  Description of Artificial Sequence: Synthetic oligonucleotide
ggaaaagtatctgtaatta

SEQ ID NO: 2839 - DNA, 19 bp, Artificial Sequence
  Description of Artificial Sequence: Synthetic oligonucleotide
gaaaagtatctgtaattaa

SEQ ID NO: 2840 - DNA, 19 bp, Artificial Sequence
  Description of Artificial Sequence: Synthetic oligonucleotide
aaaagtatctgtaattaaa

SEQ ID NO: 2841 - DNA, 19 bp, Artificial Sequence
  Description of Artificial Sequence: Synthetic oligonucleotide
aaagtatctgtaattaaag

SEQ ID NO: 2842 - DNA, 19 bp, Artificial Sequence
  Description of Artificial Sequence: Synthetic oligonucleotide
aagtatctgtaattaaagt

SEQ ID NO: 2843 - DNA, 19 bp, Artificial Sequence
  Description of Artificial Sequence: Synthetic oligonucleotide
agtatctgtaattaaagtt

SEQ ID NO: 2844 - DNA, 19 bp, Artificial Sequence
  Description of Artificial Sequence: Synthetic oligonucleotide
gtatctgtaattaaagttt

SEQ ID NO: 2845 - DNA, 19 bp, Artificial Sequence
  Description of Artificial Sequence: Synthetic oligonucleotide
tatctgtaattaaagtttc

SEQ ID NO: 2846 - DNA, 19 bp, Artificial Sequence
  Description of Artificial Sequence: Synthetic oligonucleotide
atctgtaattaaagtttcg

SEQ ID NO: 2847 - DNA, 19 bp, Artificial Sequence
  Description of Artificial Sequence: Synthetic oligonucleotide
tctgtaattaaagtttcga

SEQ ID NO: 2848 - DNA, 19 bp, Artificial Sequence
  Description of Artificial Sequence: Synthetic oligonucleotide
ctgtaattaaagtttcgaa

SEQ ID NO: 2849 - DNA, 19 bp, Artificial Sequence
  Description of Artificial Sequence: Synthetic oligonucleotide
tgtaattaaagtttcgaag

SEQ ID NO: 2850 - DNA, 19 bp, Artificial Sequence
  Description of Artificial Sequence: Synthetic oligonucleotide
gtaattaaagtttcgaagt

SEQ ID NO: 2851 - DNA, 19 bp, Artificial Sequence
  Description of Artificial Sequence: Synthetic oligonucleotide
taattaaagtttcgaagta

SEQ ID NO: 2852 - DNA, 19 bp, Artificial Sequence
  Description of Artificial Sequence: Synthetic oligonucleotide
aattaaagtttcgaagtaa

SEQ ID NO: 2853 - DNA, 19 bp, Artificial Sequence
  Description of Artificial Sequence: Synthetic oligonucleotide
attaaagtttcgaagtaat

SEQ ID NO: 2854 - DNA, 19 bp, Artificial Sequence
  Description of Artificial Sequence: Synthetic oligonucleotide
ttaaagtttcgaagtaatt

SEQ ID NO: 2855 - DNA, 19 bp, Artificial Sequence
  Description of Artificial Sequence: Synthetic oligonucleotide
taaagtttcgaagtaattt

SEQ ID NO: 2856 - DNA, 19 bp, Artificial Sequence
  Description of Artificial Sequence: Synthetic oligonucleotide
aaagtttcgaagtaattta

SEQ ID NO: 2857 - DNA, 19 bp, Artificial Sequence
  Description of Artificial Sequence: Synthetic oligonucleotide
aagtttcgaagtaatttaa

SEQ ID NO: 2858 - DNA, 19 bp, Artificial Sequence
  Description of Artificial Sequence: Synthetic oligonucleotide
agtttcgaagtaatttaac

SEQ ID NO: 2859 - DNA, 19 bp, Artificial Sequence
  Description of Artificial Sequence: Synthetic oligonucleotide
gtttcgaagtaatttaacc

SEQ ID NO: 2860 - DNA, 19 bp, Artificial Sequence
  Description of Artificial Sequence: Synthetic oligonucleotide
tttcgaagtaatttaacct

SEQ ID NO: 2861 - DNA, 19 bp, Artificial Sequence
  Description of Artificial Sequence: Synthetic oligonucleotide
ttcgaagtaatttaaccta

SEQ ID NO: 2862 - DNA, 19 bp, Artificial Sequence
  Description of Artificial Sequence: Synthetic oligonucleotide
tcgaagtaatttaacctaa

SEQ ID NO: 2863 - DNA, 19 bp, Artificial Sequence
  Description of Artificial Sequence: Synthetic oligonucleotide
cgaagtaatttaacctaaa

SEQ ID NO: 2864 - DNA, 19 bp, Artificial Sequence
  Description of Artificial Sequence: Synthetic oligonucleotide
gaagtaatttaacctaaaa

SEQ ID NO: 2865 - DNA, 19 bp, Artificial Sequence
  Description of Artificial Sequence: Synthetic oligonucleotide
aagtaatttaacctaaaaa

SEQ ID NO: 2866 - DNA, 19 bp, Artificial Sequence
  Description of Artificial Sequence: Synthetic oligonucleotide
agtaatttaacctaaaaaa

SEQ ID NO: 2867 - DNA, 19 bp, Artificial Sequence
  Description of Artificial Sequence: Synthetic oligonucleotide
gtaatttaacctaaaaaaa

SEQ ID NO: 2868 - DNA, 19 bp, Artificial Sequence
  Description of Artificial Sequence: Synthetic oligonucleotide
taatttaacctaaaaaaaa

SEQ ID NO: 2869 - DNA, 19 bp, Artificial Sequence
  Description of Artificial Sequence: Synthetic oligonucleotide
aatttaacctaaaaaaaaa

SEQ ID NO: 2870 - DNA, 19 bp, Artificial Sequence
  Description of Artificial Sequence: Synthetic oligonucleotide
atttaacctaaaaaaaaaa

SEQ ID NO: 2871 - DNA, 19 bp, Artificial Sequence
  Description of Artificial Sequence: Synthetic oligonucleotide
tttaacctaaaaaaaaaaa

SEQ ID NO: 2872 - DNA, 19 bp, Artificial Sequence
  Description of Artificial Sequence: Synthetic oligonucleotide
ttaacctaaaaaaaaaaaa

SEQ ID NO: 2873 - DNA, 19 bp, Artificial Sequence
  Description of Artificial Sequence: Synthetic oligonucleotide
taacctaaaaaaaaaaaaa

SEQ ID NO: 2874 - DNA, 19 bp, Artificial Sequence
  Description of Artificial Sequence: Synthetic oligonucleotide
aacctaaaaaaaaaaaaaa

SEQ ID NO: 2875 - DNA, 19 bp, Artificial Sequence
  Description of Artificial Sequence: Synthetic oligonucleotide
acctaaaaaaaaaaaaaaa

SEQ ID NO: 2876 - DNA, 19 bp, Artificial Sequence
  Description of Artificial Sequence: Synthetic oligonucleotide
cctaaaaaaaaaaaaaaaa

SEQ ID NO: 2877 - DNA, 19 bp, Artificial Sequence
  Description of Artificial Sequence: Synthetic oligonucleotide
ctaaaaaaaaaaaaaaaaa

SEQ ID NO: 2878 - DNA, 19 bp, Artificial Sequence
  Description of Artificial Sequence: Synthetic oligonucleotide
taaaaaaaaaaaaaaaaaa

SEQ ID NO: 2879 - DNA, 19 bp, Artificial Sequence
  Description of Artificial Sequence: Synthetic oligonucleotide
ttggtgcactcacagccgt

SEQ ID NO: 2880 - DNA, 19 bp, Artificial Sequence
  Description of Artificial Sequence: Synthetic oligonucleotide
cttggtgcactcacagccg

SEQ ID NO: 2881 - DNA, 19 bp, Artificial Sequence
  Description of Artificial Sequence: Synthetic oligonucleotide
ccttggtgcactcacagcc

SEQ ID NO: 2882 - DNA, 19 bp, Artificial Sequence
  Description of Artificial Sequence: Synthetic oligonucleotide
gccttggtgcactcacagc

SEQ ID NO: 2883 - DNA, 19 bp, Artificial Sequence
  Description of Artificial Sequence: Synthetic oligonucleotide
ggccttggtgcactcacag

SEQ ID NO: 2884 - DNA, 19 bp, Artificial Sequence
  Description of Artificial Sequence: Synthetic oligonucleotide
cggccttggtgcactcaca

SEQ ID NO: 2885 - DNA, 19 bp, Artificial Sequence
  Description of Artificial Sequence: Synthetic oligonucleotide
acggccttggtgcactcac

SEQ ID NO: 2886 - DNA, 19 bp, Artificial Sequence
  Description of Artificial Sequence: Synthetic oligonucleotide
cacggccttggtgcactca

SEQ ID NO: 2887 - DNA, 19 bp, Artificial Sequence
  Description of Artificial Sequence: Synthetic oligonucleotide
tcacggccttggtgcactc

SEQ ID NO: 2888 - DNA, 19 bp, Artificial Sequence
  Description of Artificial Sequence: Synthetic oligonucleotide
ttcacggccttggtgcact

SEQ ID NO: 2889 - DNA, 19 bp, Artificial Sequence
  Description of Artificial Sequence: Synthetic oligonucleotide
gttcacggccttggtgcac

SEQ ID NO: 2890 - DNA, 19 bp, Artificial Sequence
  Description of Artificial Sequence: Synthetic oligonucleotide
agttcacggccttggtgca

SEQ ID NO: 2891 - DNA, 19 bp, Artificial Sequence
  Description of Artificial Sequence: Synthetic oligonucleotide
aagttcacggccttggtgc

SEQ ID NO: 2892 - DNA, 19 bp, Artificial Sequence
  Description of Artificial Sequence: Synthetic oligonucleotide
aaagttcacggccttggtg

SEQ ID NO: 2893 - DNA, 19 bp, Artificial Sequence
  Description of Artificial Sequence: Synthetic oligonucleotide
caaagttcacggccttggt

SEQ ID NO: 2894 - DNA, 19 bp, Artificial Sequence
  Description of Artificial Sequence: Synthetic oligonucleotide
gcaaagttcacggccttgg

SEQ ID NO: 2895 - DNA, 19 bp, Artificial Sequence
  Description of Artificial Sequence: Synthetic oligonucleotide
ggcaaagttcacggccttg

SEQ ID NO: 2896 - DNA, 19 bp, Artificial Sequence
  Description of Artificial Sequence: Synthetic oligonucleotide
tggcaaagttcacggcctt

SEQ ID NO: 2897 - DNA, 19 bp, Artificial Sequence
  Description of Artificial Sequence: Synthetic oligonucleotide
atggcaaagttcacggcct

SEQ ID NO: 2898 - DNA, 19 bp, Artificial Sequence
  Description of Artificial Sequence: Synthetic oligonucleotide
catggcaaagttcacggcc

SEQ ID NO: 2899 - DNA, 19 bp, Artificial Sequence
  Description of Artificial Sequence: Synthetic oligonucleotide
gcatggcaaagttcacggc

SEQ ID NO: 2900 - DNA, 19 bp, Artificial Sequence
  Description of Artificial Sequence: Synthetic oligonucleotide
tgcatggcaaagttcacgg

SEQ ID NO: 2901 - DNA, 19 bp, Artificial Sequence
  Description of Artificial Sequence: Synthetic oligonucleotide
atgcatggcaaagttcacg

SEQ ID NO: 2902 - DNA, 19 bp, Artificial Sequence
  Description of Artificial Sequence: Synthetic oligonucleotide
catgcatggcaaagttcac

SEQ ID NO: 2903 - DNA, 19 bp, Artificial Sequence
  Description of Artificial Sequence: Synthetic oligonucleotide
tcatgcatggcaaagttca

SEQ ID NO: 2904 - DNA, 19 bp, Artificial Sequence
  Description of Artificial Sequence: Synthetic oligonucleotide
ttcatgcatggcaaagttc

SEQ ID NO: 2905 - DNA, 19 bp, Artificial Sequence
  Description of Artificial Sequence: Synthetic oligonucleotide
gttcatgcatggcaaagtt

SEQ ID NO: 2906 - DNA, 19 bp, Artificial Sequence
  Description of Artificial Sequence: Synthetic oligonucleotide
agttcatgcatggcaaagt

SEQ ID NO: 2907 - DNA, 19 bp, Artificial Sequence
  Description of Artificial Sequence: Synthetic oligonucleotide
aagttcatgcatggcaaag

SEQ ID NO: 2908 - DNA, 19 bp, Artificial Sequence
  Description of Artificial Sequence: Synthetic oligonucleotide
gaagttcatgcatggcaaa

SEQ ID NO: 2909 - DNA, 19 bp, Artificial Sequence
  Description of Artificial Sequence: Synthetic oligonucleotide
tgaagttcatgcatggcaa

SEQ ID NO: 2910 - DNA, 19 bp, Artificial Sequence
  Description of Artificial Sequence: Synthetic oligonucleotide
ctgaagttcatgcatggca

SEQ ID NO: 2911 - DNA, 19 bp, Artificial Sequence
  Description of Artificial Sequence: Synthetic oligonucleotide
gctgaagttcatgcatggc

SEQ ID NO: 2912 - DNA, 19 bp, Artificial Sequence
  Description of Artificial Sequence: Synthetic oligonucleotide
agctgaagttcatgcatgg

SEQ ID NO: 2913 - DNA, 19 bp, Artificial Sequence
  Description of Artificial Sequence: Synthetic oligonucleotide
gagctgaagttcatgcatg

SEQ ID NO: 2914 - DNA, 19 bp, Artificial Sequence
  Description of Artificial Sequence: Synthetic oligonucleotide
tgagctgaagttcatgcat

SEQ ID NO: 2915 - DNA, 19 bp, Artificial Sequence
  Description of Artificial Sequence: Synthetic oligonucleotide
atgagctgaagttcatgca

SEQ ID NO: 2916 - DNA, 19 bp, Artificial Sequence
  Description of Artificial Sequence: Synthetic oligonucleotide
gatgagctgaagttcatgc

SEQ ID NO: 2917 - DNA, 19 bp, Artificial Sequence
  Description of Artificial Sequence: Synthetic oligonucleotide
ggatgagctgaagttcatg

SEQ ID NO: 2918 - DNA, 19 bp, Artificial Sequence
  Description of Artificial Sequence: Synthetic oligonucleotide
cggatgagctgaagttcat

SEQ ID NO: 2919 - DNA, 19 bp, Artificial Sequence
  Description of Artificial Sequence: Synthetic oligonucleotide
ccggatgagctgaagttca

SEQ ID NO: 2920 - DNA, 19 bp, Artificial Sequence
  Description of Artificial Sequence: Synthetic oligonucleotide
cccggatgagctgaagttc

SEQ ID NO: 2921 - DNA, 19 bp, Artificial Sequence
  Description of Artificial Sequence: Synthetic oligonucleotide
acccggatgagctgaagtt

SEQ ID NO: 2922 - DNA, 19 bp, Artificial Sequence
  Description of Artificial Sequence: Synthetic oligonucleotide
cacccggatgagctgaagt

SEQ ID NO: 2923 - DNA, 19 bp, Artificial Sequence
  Description of Artificial Sequence: Synthetic oligonucleotide
ccacccggatgagctgaag

SEQ ID NO: 2924 - DNA, 19 bp, Artificial Sequence
  Description of Artificial Sequence: Synthetic oligonucleotide
tccacccggatgagctgaa

SEQ ID NO: 2925 - DNA, 19 bp, Artificial Sequence
  Description of Artificial Sequence: Synthetic oligonucleotide
ctccacccggatgagctga

SEQ ID NO: 2926 - DNA, 19 bp, Artificial Sequence
  Description of Artificial Sequence: Synthetic oligonucleotide
tctccacccggatgagctg

SEQ ID NO: 2927 - DNA, 19 bp, Artificial Sequence
  Description of Artificial Sequence: Synthetic oligonucleotide
ttctccacccggatgagct

SEQ ID NO: 2928 - DNA, 19 bp, Artificial Sequence
  Description of Artificial Sequence: Synthetic oligonucleotide
cttctccacccggatgagc

SEQ ID NO: 2929 - DNA, 19 bp, Artificial Sequence
  Description of Artificial Sequence: Synthetic oligonucleotide
gcttctccacccggatgag

SEQ ID NO: 2930 - DNA, 19 bp, Artificial Sequence
  Description of Artificial Sequence: Synthetic oligonucleotide
tgcttctccacccggatga

SEQ ID NO: 2931 - DNA, 19 bp, Artificial Sequence
  Description of Artificial Sequence: Synthetic oligonucleotide
ctgcttctccacccggatg

SEQ ID NO: 2932 - DNA, 19 bp, Artificial Sequence
  Description of Artificial Sequence: Synthetic oligonucleotide
actgcttctccacccggat

SEQ ID NO: 2933 - DNA, 19 bp, Artificial Sequence
  Description of Artificial Sequence: Synthetic oligonucleotide
tactgcttctccacccgga

SEQ ID NO: 2934 - DNA, 19 bp, Artificial Sequence
  Description of Artificial Sequence: Synthetic oligonucleotide
gtactgcttctccacccgg

SEQ ID NO: 2935 - DNA, 19 bp, Artificial Sequence
  Description of Artificial Sequence: Synthetic oligonucleotide
ggtactgcttctccacccg

SEQ ID NO: 2936 - DNA, 19 bp, Artificial Sequence
  Description of Artificial Sequence: Synthetic oligonucleotide
aggtactgcttctccaccc

SEQ ID NO: 2937 - DNA, 19 bp, Artificial Sequence
  Description of Artificial Sequence: Synthetic oligonucleotide
aaggtactgcttctccacc

SEQ ID NO: 2938 - DNA, 19 bp, Artificial Sequence
  Description of Artificial Sequence: Synthetic oligonucleotide
gaaggtactgcttctccac

SEQ ID NO: 2939 - DNA, 19 bp, Artificial Sequence
  Description of Artificial Sequence: Synthetic oligonucleotide
tgaaggtactgcttctcca

SEQ ID NO: 2940 - DNA, 19 bp, Artificial Sequence
  Description of Artificial Sequence: Synthetic oligonucleotide
gtgaaggtactgcttctcc

SEQ ID NO: 2941 - DNA, 19 bp, Artificial Sequence
  Description of Artificial Sequence: Synthetic oligonucleotide
ggtgaaggtactgcttctc

SEQ ID NO: 2942 - DNA, 19 bp, Artificial Sequence
  Description of Artificial Sequence: Synthetic oligonucleotide
tggtgaaggtactgcttct

SEQ ID NO: 2943 - DNA, 19 bp, Artificial Sequence
  Description of Artificial Sequence: Synthetic oligonucleotide
gtggtgaaggtactgcttc

SEQ ID NO: 2944 - DNA, 19 bp, Artificial Sequence
  Description of Artificial Sequence: Synthetic oligonucleotide
tgtggtgaaggtactgctt

SEQ ID NO: 2945 - DNA, 19 bp, Artificial Sequence
  Description of Artificial Sequence: Synthetic oligonucleotide
ttgtggtgaaggtactgct

SEQ ID NO: 2946 - DNA, 19 bp, Artificial Sequence
  Description of Artificial Sequence: Synthetic oligonucleotide
gttgtggtgaaggtactgc

SEQ ID NO: 2947 - DNA, 19 bp, Artificial Sequence
  Description of Artificial Sequence: Synthetic oligonucleotide
ggttgtggtgaaggtactg

SEQ ID NO: 2948 - DNA, 19 bp, Artificial Sequence
  Description of Artificial Sequence: Synthetic oligonucleotide
aggttgtggtgaaggtact

SEQ ID NO: 2949 - DNA, 19 bp, Artificial Sequence
  Description of Artificial Sequence: Synthetic oligonucleotide
gaggttgtggtgaaggtac

SEQ ID NO: 2950 - DNA, 19 bp, Artificial Sequence
  Description of Artificial Sequence: Synthetic oligonucleotide
cgaggttgtggtgaaggta

SEQ ID NO: 2951 - DNA, 19 bp, Artificial Sequence
  Description of Artificial Sequence: Synthetic oligonucleotide
tcgaggttgtggtgaaggt

SEQ ID NO: 2952 - DNA, 19 bp, Artificial Sequence
  Description of Artificial Sequence: Synthetic oligonucleotide
gtcgaggttgtggtgaagg

SEQ ID NO: 2953 - DNA, 19 bp, Artificial Sequence
  Description of Artificial Sequence: Synthetic oligonucleotide
ggtcgaggttgtggtgaag

SEQ ID NO: 2954 - DNA, 19 bp, Artificial Sequence
  Description of Artificial Sequence: Synthetic oligonucleotide
tggtcgaggttgtggtgaa

SEQ ID NO: 2955 - DNA, 19 bp, Artificial Sequence
  Description of Artificial Sequence: Synthetic oligonucleotide
gtggtcgaggttgtggtga

SEQ ID NO: 2956 - DNA, 19 bp, Artificial Sequence
  Description of Artificial Sequence: Synthetic oligonucleotide
ggtggtcgaggttgtggtg

SEQ ID NO: 2957 - DNA, 19 bp, Artificial Sequence
  Description of Artificial Sequence: Synthetic oligonucleotide
aggtggtcgaggttgtggt

SEQ ID NO: 2958 - DNA, 19 bp, Artificial Sequence
  Description of Artificial Sequence: Synthetic oligonucleotide
caggtggtcgaggttgtgg

SEQ ID NO: 2959 - DNA, 19 bp, Artificial Sequence
  Description of Artificial Sequence: Synthetic oligonucleotide
ccaggtggtcgaggttgtg

SEQ ID NO: 2960 - DNA, 19 bp, Artificial Sequence
  Description of Artificial Sequence: Synthetic oligonucleotide
accaggtggtcgaggttgt

SEQ ID NO: 2961 - DNA, 19 bp, Artificial Sequence
  Description of Artificial Sequence: Synthetic oligonucleotide
gaccaggtggtcgaggttg

SEQ ID NO: 2962 - DNA, 19 bp, Artificial Sequence
  Description of Artificial Sequence: Synthetic oligonucleotide
cgaccaggtggtcgaggtt

SEQ ID NO: 2963 - DNA, 19 bp, Artificial Sequence
  Description of Artificial Sequence: Synthetic oligonucleotide
tcgaccaggtggtcgaggt

SEQ ID NO: 2964 - DNA, 19 bp, Artificial Sequence
  Description of Artificial Sequence: Synthetic oligonucleotide
ctcgaccaggtggtcgagg

SEQ ID NO: 2965 - DNA, 19 bp, Artificial Sequence
  Description of Artificial Sequence: Synthetic oligonucleotide
cctcgaccaggtggtcgag

SEQ ID NO: 2966 - DNA, 19 bp, Artificial Sequence
  Description of Artificial Sequence: Synthetic oligonucleotide
tcctcgaccaggtggtcga

SEQ ID NO: 2967 - DNA, 19 bp, Artificial Sequence
  Description of Artificial Sequence: Synthetic oligonucleotide
ctcctcgaccaggtggtcg

SEQ ID NO: 2968 - DNA, 19 bp, Artificial Sequence
  Description of Artificial Sequence: Synthetic oligonucleotide
gctcctcgaccaggtggtc

SEQ ID NO: 2969 - DNA, 19 bp, Artificial Sequence
  Description of Artificial Sequence: Synthetic oligonucleotide
agctcctcgaccaggtggt

SEQ ID NO: 2970 - DNA, 19 bp, Artificial Sequence
  Description of Artificial Sequence: Synthetic oligonucleotide
gagctcctcgaccaggtgg

SEQ ID NO: 2971 - DNA, 19 bp, Artificial Sequence
  Description of Artificial Sequence: Synthetic oligonucleotide
agagctcctcgaccaggtg

SEQ ID NO: 2972 - DNA, 19 bp, Artificial Sequence
  Description of Artificial Sequence: Synthetic oligonucleotide
aagagctcctcgaccaggt

SEQ ID NO: 2973 - DNA, 19 bp, Artificial Sequence
  Description of Artificial Sequence: Synthetic oligonucleotide
gaagagctcctcgaccagg

SEQ ID NO: 2974 - DNA, 19 bp, Artificial Sequence
  Description of Artificial Sequence: Synthetic oligonucleotide
ggaagagctcctcgaccag

SEQ ID NO: 2975 - DNA, 19 bp, Artificial Sequence
  Description of Artificial Sequence: Synthetic oligonucleotide
aggaagagctcctcgacca

SEQ ID NO: 2976 - DNA, 19 bp, Artificial Sequence
  Description of Artificial Sequence: Synthetic oligonucleotide
aaggaagagctcctcgacc

SEQ ID NO: 2977 - DNA, 19 bp, Artificial Sequence
  Description of Artificial Sequence: Synthetic oligonucleotide
caaggaagagctcctcgac

SEQ ID NO: 2978 - DNA, 19 bp, Artificial Sequence
  Description of Artificial Sequence: Synthetic oligonucleotide
ccaaggaagagctcctcga

SEQ ID NO: 2979 - DNA, 19 bp, Artificial Sequence
  Description of Artificial Sequence: Synthetic oligonucleotide
accaaggaagagctcctcg

SEQ ID NO: 2980 - DNA, 19 bp, Artificial Sequence
  Description of Artificial Sequence: Synthetic oligonucleotide
caccaaggaagagctcctc

SEQ ID NO: 2981 - DNA, 19 bp, Artificial Sequence
  Description of Artificial Sequence: Synthetic oligonucleotide
tcaccaaggaagagctcct

SEQ ID NO: 2982 - DNA, 19 bp, Artificial Sequence
  Description of Artificial Sequence: Synthetic oligonucleotide
gtcaccaaggaagagctcc

SEQ ID NO: 2983 - DNA, 19 bp, Artificial Sequence
  Description of Artificial Sequence: Synthetic oligonucleotide
tgtcaccaaggaagagctc

SEQ ID NO: 2984 - DNA, 19 bp, Artificial Sequence
  Description of Artificial Sequence: Synthetic oligonucleotide
atgtcaccaaggaagagct

SEQ ID NO: 2985 - DNA, 19 bp, Artificial Sequence
  Description of Artificial Sequence: Synthetic oligonucleotide
aatgtcaccaaggaagagc

SEQ ID NO: 2986 - DNA, 19 bp, Artificial Sequence
  Description of Artificial Sequence: Synthetic oligonucleotide
gaatgtcaccaaggaagag

SEQ ID NO: 2987 - DNA, 19 bp, Artificial Sequence
  Description of Artificial Sequence: Synthetic oligonucleotide
tgaatgtcaccaaggaaga

SEQ ID NO: 2988 - DNA, 19 bp, Artificial Sequence
  Description of Artificial Sequence: Synthetic oligonucleotide
gtgaatgtcaccaaggaag

SEQ ID NO: 2989 - DNA, 19 bp, Artificial Sequence
  Description of Artificial Sequence: Synthetic oligonucleotide
tgtgaatgtcaccaaggaa

SEQ ID NO: 2990 - DNA, 19 bp, Artificial Sequence
  Description of Artificial Sequence: Synthetic oligonucleotide
gtgtgaatgtcaccaagga

SEQ ID NO: 2991 - DNA, 19 bp, Artificial Sequence
  Description of Artificial Sequence: Synthetic oligonucleotide
agtgtgaatgtcaccaagg

SEQ ID NO: 2992 - DNA, 19 bp, Artificial Sequence
  Description of Artificial Sequence: Synthetic oligonucleotide
cagtgtgaatgtcaccaag

SEQ ID NO: 2993 - DNA, 19 bp, Artificial Sequence
  Description of Artificial Sequence: Synthetic oligonucleotide
tcagtgtgaatgtcaccaa

SEQ ID NO: 2994 - DNA, 19 bp, Artificial Sequence
  Description of Artificial Sequence: Synthetic oligonucleotide
atcagtgtgaatgtcacca

SEQ ID NO: 2995 - DNA, 19 bp, Artificial Sequence
  Description of Artificial Sequence: Synthetic oligonucleotide
catcagtgtgaatgtcacc

SEQ ID NO: 2996 - DNA, 19 bp, Artificial Sequence
  Description of Artificial Sequence: Synthetic oligonucleotide
gcatcagtgtgaatgtcac

SEQ ID NO: 2997 - DNA, 19 bp, Artificial Sequence
  Description of Artificial Sequence: Synthetic oligonucleotide
ggcatcagtgtgaatgtca

SEQ ID NO: 2998 - DNA, 19 bp, Artificial Sequence
  Description of Artificial Sequence: Synthetic oligonucleotide
tggcatcagtgtgaatgtc

SEQ ID NO: 2999 - DNA, 19 bp, Artificial Sequence
  Description of Artificial Sequence: Synthetic oligonucleotide
gtggcatcagtgtgaatgt

SEQ ID NO: 3000 - DNA, 19 bp, Artificial Sequence
  Description of Artificial Sequence: Synthetic oligonucleotide
ggtggcatcagtgtgaatg

SEQ ID NO: 3001 - DNA, 19 bp, Artificial Sequence
  Description of Artificial Sequence: Synthetic oligonucleotide
gggtggcatcagtgtgaat

SEQ ID NO: 3002 - DNA, 19 bp, Artificial Sequence
  Description of Artificial Sequence: Synthetic oligonucleotide
tgggtggcatcagtgtgaa

SEQ ID NO: 3003 - DNA, 19 bp, Artificial Sequence
  Description of Artificial Sequence: Synthetic oligonucleotide
ctgggtggcatcagtgtga

SEQ ID NO: 3004 - DNA, 19 bp, Artificial Sequence
  Description of Artificial Sequence: Synthetic oligonucleotide
tctgggtggcatcagtgtg

SEQ ID NO: 3005 - DNA, 19 bp, Artificial Sequence
  Description of Artificial Sequence: Synthetic oligonucleotide
ctctgggtggcatcagtgt

SEQ ID NO: 3006 - DNA, 19 bp, Artificial Sequence
  Description of Artificial Sequence: Synthetic oligonucleotide
cctctgggtggcatcagtg

SEQ ID NO: 3007 - DNA, 19 bp, Artificial Sequence
  Description of Artificial Sequence: Synthetic oligonucleotide
tcctctgggtggcatcagt

SEQ ID NO: 3008 - DNA, 19 bp, Artificial Sequence
  Description of Artificial Sequence: Synthetic oligonucleotide
atcctctgggtggcatcag

SEQ ID NO: 3009 - DNA, 19 bp, Artificial Sequence
  Description of Artificial Sequence: Synthetic oligonucleotide
catcctctgggtggcatca

SEQ ID NO: 3010 - DNA, 19 bp, Artificial Sequence
  Description of Artificial Sequence: Synthetic oligonucleotide
acatcctctgggtggcatc

SEQ ID NO: 3011 - DNA, 19 bp, Artificial Sequence
  Description of Artificial Sequence: Synthetic oligonucleotide
aacatcctctgggtggcat

SEQ ID NO: 3012 - DNA, 19 bp, Artificial Sequence
  Description of Artificial Sequence: Synthetic oligonucleotide
gaacatcctctgggtggca

SEQ ID NO: 3013 - DNA, 19 bp, Artificial Sequence
  Description of Artificial Sequence: Synthetic oligonucleotide
agaacatcctctgggtggc

SEQ ID NO: 3014 - DNA, 19 bp, Artificial Sequence
  Description of Artificial Sequence: Synthetic oligonucleotide
tagaacatcctctgggtgg

SEQ ID NO: 3015 - DNA, 19 bp, Artificial Sequence
  Description of Artificial Sequence: Synthetic oligonucleotide
gtagaacatcctctgggtg

SEQ ID NO: 3016 - DNA, 19 bp, Artificial Sequence
  Description of Artificial Sequence: Synthetic oligonucleotide
ggtagaacatcctctgggt

SEQ ID NO: 3017 - DNA, 19 bp, Artificial Sequence
  Description of Artificial Sequence: Synthetic oligonucleotide
cggtagaacatcctctggg

SEQ ID NO: 3018 - DNA, 19 bp, Artificial Sequence
  Description of Artificial Sequence: Synthetic oligonucleotide
ccggtagaacatcctctgg

SEQ ID NO: 3019 - DNA, 19 bp, Artificial Sequence
  Description of Artificial Sequence: Synthetic oligonucleotide
gccggtagaacatcctctg

SEQ ID NO: 3020 - DNA, 19 bp, Artificial Sequence
  Description of Artificial Sequence: Synthetic oligonucleotide
ggccggtagaacatcctct

SEQ ID NO: 3021 - DNA, 19 bp, Artificial Sequence
  Description of Artificial Sequence: Synthetic oligonucleotide
gggccggtagaacatcctc

SEQ ID NO: 3022 - DNA, 19 bp, Artificial Sequence
  Description of Artificial Sequence: Synthetic oligonucleotide
agggccggtagaacatcct

SEQ ID NO: 3023 - DNA, 19 bp, Artificial Sequence
  Description of Artificial Sequence: Synthetic oligonucleotide
gagggccggtagaacatcc

SEQ ID NO: 3024 - DNA, 19 bp, Artificial Sequence
  Description of Artificial Sequence: Synthetic oligonucleotide
ggagggccggtagaacatc

SEQ ID NO: 3025 - DNA, 19 bp, Artificial Sequence
  Description of Artificial Sequence: Synthetic oligonucleotide
tggagggccggtagaacat

SEQ ID NO: 3026 - DNA, 19 bp, Artificial Sequence
  Description of Artificial Sequence: Synthetic oligonucleotide
ctggagggccggtagaaca

SEQ ID NO: 3027 - DNA, 19 bp, Artificial Sequence
  Description of Artificial Sequence: Synthetic oligonucleotide
actggagggccggtagaac

SEQ ID NO: 3028 - DNA, 19 bp, Artificial Sequence
  Description of Artificial Sequence: Synthetic oligonucleotide
aactggagggccggtagaa

SEQ ID NO: 3029 - DNA, 19 bp, Artificial Sequence
  Description of Artificial Sequence: Synthetic oligonucleotide
taactggagggccggtaga

SEQ ID NO: 3030 - DNA, 19 bp, Artificial Sequence
  Description of Artificial Sequence: Synthetic oligonucleotide
gtaactggagggccggtag

SEQ ID NO: 3031 - DNA, 19 bp, Artificial Sequence
  Description of Artificial Sequence: Synthetic oligonucleotide
ggtaactggagggccggta

SEQ ID NO: 3032 - DNA, 19 bp, Artificial Sequence
  Description of Artificial Sequence: Synthetic oligonucleotide
tggtaactggagggccggt

SEQ ID NO: 3033 - DNA, 19 bp, Artificial Sequence
  Description of Artificial Sequence: Synthetic oligonucleotide
ctggtaactggagggccgg

SEQ ID NO: 3034 - DNA, 19 bp, Artificial Sequence
  Description of Artificial Sequence: Synthetic oligonucleotide
gctggtaactggagggccg

SEQ ID NO: 3035 - DNA, 19 bp, Artificial Sequence
  Description of Artificial Sequence: Synthetic oligonucleotide
ggctggtaactggagggcc

SEQ ID NO: 3036 - DNA, 19 bp, Artificial Sequence
  Description of Artificial Sequence: Synthetic oligonucleotide
gggctggtaactggagggc

SEQ ID NO: 3037 - DNA, 19 bp, Artificial Sequence
  Description of Artificial Sequence: Synthetic oligonucleotide
ggggctggtaactggaggg

SEQ ID NO: 3038 - DNA, 19 bp, Artificial Sequence
  Description of Artificial Sequence: Synthetic oligonucleotide
gggggctggtaactggagg

SEQ ID NO: 3039 - DNA, 19 bp, Artificial Sequence
  Description of Artificial Sequence: Synthetic oligonucleotide
agggggctggtaactggag

SEQ ID NO: 3040 - DNA, 19 bp, Artificial Sequence
  Description of Artificial Sequence: Synthetic oligonucleotide
gagggggctggtaactgga

SEQ ID NO: 3041 - DNA, 19 bp, Artificial Sequence
  Description of Artificial Sequence: Synthetic oligonucleotide
agagggggctggtaactgg

SEQ ID NO: 3042 - DNA, 19 bp, Artificial Sequence
  Description of Artificial Sequence: Synthetic oligonucleotide
cagagggggctggtaactg

SEQ ID NO: 3043 - DNA, 19 bp, Artificial Sequence
  Description of Artificial Sequence: Synthetic oligonucleotide
gcagagggggctggtaact

SEQ ID NO: 3044 - DNA, 19 bp, Artificial Sequence
  Description of Artificial Sequence: Synthetic oligonucleotide
tgcagagggggctggtaac

SEQ ID NO: 3045 - DNA, 19 bp, Artificial Sequence
  Description of Artificial Sequence: Synthetic oligonucleotide
ctgcagagggggctggtaa

SEQ ID NO: 3046 - DNA, 19 bp, Artificial Sequence
  Description of Artificial Sequence: Synthetic oligonucleotide
tctgcagagggggctggta

SEQ ID NO: 3047 - DNA, 19 bp, Artificial Sequence
  Description of Artificial Sequence: Synthetic oligonucleotide
ttctgcagagggggctggt

SEQ ID NO: 3048 - DNA, 19 bp, Artificial Sequence
  Description of Artificial Sequence: Synthetic oligonucleotide
attctgcagagggggctgg

SEQ ID NO: 3049 - DNA, 19 bp, Artificial Sequence
  Description of Artificial Sequence: Synthetic oligonucleotide
cattctgcagagggggctg

SEQ ID NO: 3050 - DNA, 19 bp, Artificial Sequence
  Description of Artificial Sequence: Synthetic oligonucleotide
gcattctgcagagggggct

SEQ ID NO: 3051 - DNA, 19 bp, Artificial Sequence
  Description of Artificial Sequence: Synthetic oligonucleotide
ggcattctgcagagggggc

SEQ ID NO: 3052 - DNA, 19 bp, Artificial Sequence
  Description of Artificial Sequence: Synthetic oligonucleotide
tggcattctgcagaggggg

SEQ ID NO: 3053 - DNA, 19 bp, Artificial Sequence
  Description of Artificial Sequence: Synthetic oligonucleotide
ttggcattctgcagagggg

SEQ ID NO: 3054 - DNA, 19 bp, Artificial Sequence
  Description of Artificial Sequence: Synthetic oligonucleotide
cttggcattctgcagaggg

SEQ ID NO: 3055 - DNA, 19 bp, Artificial Sequence
  Description of Artificial Sequence: Synthetic oligonucleotide
tcttggcattctgcagagg

SEQ ID NO: 3056 - DNA, 19 bp, Artificial Sequence
  Description of Artificial Sequence: Synthetic oligonucleotide
ttcttggcattctgcagag

SEQ ID NO: 3057 - DNA, 19 bp, Artificial Sequence
  Description of Artificial Sequence: Synthetic oligonucleotide
gttcttggcattctgcaga

SEQ ID NO: 3058 - DNA, 19 bp, Artificial Sequence
  Description of Artificial Sequence: Synthetic oligonucleotide
ggttcttggcattctgcag

SEQ ID NO: 3059 - DNA, 19 bp, Artificial Sequence
  Description of Artificial Sequence: Synthetic oligonucleotide
tggttcttggcattctgca

SEQ ID NO: 3060 - DNA, 19 bp, Artificial Sequence
  Description of Artificial Sequence: Synthetic oligonucleotide
gtggttcttggcattctgc

SEQ ID NO: 3061 - DNA, 19 bp, Artificial Sequence
  Description of Artificial Sequence: Synthetic oligonucleotide
cgtggttcttggcattctg

SEQ ID NO: 3062 - DNA, 19 bp, Artificial Sequence
  Description of Artificial Sequence: Synthetic oligonucleotide
tcgtggttcttggcattct

SEQ ID NO: 3063 - DNA, 19 bp, Artificial Sequence
  Description of Artificial Sequence: Synthetic oligonucleotide
gtcgtggttcttggcattc

SEQ ID NO: 3064 - DNA, 19 bp, Artificial Sequence
  Description of Artificial Sequence: Synthetic oligonucleotide
ggtcgtggttcttggcatt

SEQ ID NO: 3065 - DNA, 19 bp, Artificial Sequence
  Description of Artificial Sequence: Synthetic oligonucleotide
tggtcgtggttcttggcat

SEQ ID NO: 3066 - DNA, 19 bp, Artificial Sequence
  Description of Artificial Sequence: Synthetic oligonucleotide
atggtcgtggttcttggca

SEQ ID NO: 3067 - DNA, 19 bp, Artificial Sequence
  Description of Artificial Sequence: Synthetic oligonucleotide
catggtcgtggttcttggc

SEQ ID NO: 3068 - DNA, 19 bp, Artificial Sequence
  Description of Artificial Sequence: Synthetic oligonucleotide
gcatggtcgtggttcttgg

SEQ ID NO: 3069 - DNA, 19 bp, Artificial Sequence
  Description of Artificial Sequence: Synthetic oligonucleotide
ggcatggtcgtggttcttg

SEQ ID NO: 3070 - DNA, 19 bp, Artificial Sequence
  Description of Artificial Sequence: Synthetic oligonucleotide
aggcatggtcgtggttctt

SEQ ID NO: 3071 - DNA, 19 bp, Artificial Sequence
  Description of Artificial Sequence: Synthetic oligonucleotide
caggcatggtcgtggttct

SEQ ID NO: 3072 - DNA, 19 bp, Artificial Sequence
  Description of Artificial Sequence: Synthetic oligonucleotide
gcaggcatggtcgtggttc

SEQ ID NO: 3073 - DNA, 19 bp, Artificial Sequence
  Description of Artificial Sequence: Synthetic oligonucleotide
tgcaggcatggtcgtggtt

SEQ ID NO: 3074 - DNA, 19 bp, Artificial Sequence
  Description of Artificial Sequence: Synthetic oligonucleotide
atgcaggcatggtcgtggt

SEQ ID NO: 3075 - DNA, 19 bp, Artificial Sequence
  Description of Artificial Sequence: Synthetic oligonucleotide
gatgcaggcatggtcgtgg

SEQ ID NO: 3076 - DNA, 19 bp, Artificial Sequence
  Description of Artificial Sequence: Synthetic oligonucleotide
cgatgcaggcatggtcgtg

SEQ ID NO: 3077 - DNA, 19 bp, Artificial Sequence
  Description of Artificial Sequence: Synthetic oligonucleotide
gcgatgcaggcatggtcgt

SEQ ID NO: 3078 - DNA, 19 bp, Artificial Sequence
  Description of Artificial Sequence: Synthetic oligonucleotide
ggcgatgcaggcatggtcg

SEQ ID NO: 3079 - DNA, 19 bp, Artificial Sequence
  Description of Artificial Sequence: Synthetic oligonucleotide
aggcgatgcaggcatggtc

SEQ ID NO: 3080 - DNA, 19 bp, Artificial Sequence
  Description of Artificial Sequence: Synthetic oligonucleotide
caggcgatgcaggcatggt

SEQ ID NO: 3081 - DNA, 19 bp, Artificial Sequence
  Description of Artificial Sequence: Synthetic oligonucleotide
acaggcgatgcaggcatgg

SEQ ID NO: 3082 - DNA, 19 bp, Artificial Sequence
  Description of Artificial Sequence: Synthetic oligonucleotide
gacaggcgatgcaggcatg

SEQ ID NO: 3083 - DNA, 19 bp, Artificial Sequence
  Description of Artificial Sequence: Synthetic oligonucleotide
cgacaggcgatgcaggcat

SEQ ID NO: 3084 - DNA, 19 bp, Artificial Sequence
  Description of Artificial Sequence: Synthetic oligonucleotide
ccgacaggcgatgcaggca

SEQ ID NO: 3085 - DNA, 19 bp, Artificial Sequence
  Description of Artificial Sequence: Synthetic oligonucleotide
tccgacaggcgatgcaggc

SEQ ID NO: 3086 - DNA, 19 bp, Artificial Sequence
  Description of Artificial Sequence: Synthetic oligonucleotide
atccgacaggcgatgcagg

SEQ ID NO: 3087 - DNA, 19 bp, Artificial Sequence
  Description of Artificial Sequence: Synthetic oligonucleotide
gatccgacaggcgatgcag

SEQ ID NO: 3088 - DNA, 19 bp, Artificial Sequence
  Description of Artificial Sequence: Synthetic oligonucleotide
tgatccgacaggcgatgca

SEQ ID NO: 3089 - DNA, 19 bp, Artificial Sequence
  Description of Artificial Sequence: Synthetic oligonucleotide
atgatccgacaggcgatgc

SEQ ID NO: 3090 - DNA, 19 bp, Artificial Sequence
  Description of Artificial Sequence: Synthetic oligonucleotide
gatgatccgacaggcgatg

SEQ ID NO: 3091 - DNA, 19 bp, Artificial Sequence
  Description of Artificial Sequence: Synthetic oligonucleotide
agatgatccgacaggcgat

SEQ ID NO: 3092 - DNA, 19 bp, Artificial Sequence
  Description of Artificial Sequence: Synthetic oligonucleotide
tagatgatccgacaggcga

SEQ ID NO: 3093 - DNA, 19 bp, Artificial Sequence
  Description of Artificial Sequence: Synthetic oligonucleotide
atagatgatccgacaggcg

SEQ ID NO: 3094 - DNA, 19 bp, Artificial Sequence
  Description of Artificial Sequence: Synthetic oligonucleotide
gatagatgatccgacaggc

SEQ ID NO: 3095 - DNA, 19 bp, Artificial Sequence
  Description of Artificial Sequence: Synthetic oligonucleotide
cgatagatgatccgacagg

SEQ ID NO: 3096 - DNA, 19 bp, Artificial Sequence
  Description of Artificial Sequence: Synthetic oligonucleotide
ccgatagatgatccgacag

SEQ ID NO: 3097 - DNA, 19 bp, Artificial Sequence
  Description of Artificial Sequence: Synthetic oligonucleotide
accgatagatgatccgaca

SEQ ID NO: 3098 - DNA, 19 bp, Artificial Sequence
  Description of Artificial Sequence: Synthetic oligonucleotide
gaccgatagatgatccgac

SEQ ID NO: 3099 - DNA, 19 bp, Artificial Sequence
  Description of Artificial Sequence: Synthetic oligonucleotide
tgaccgatagatgatccga

SEQ ID NO: 3100 - DNA, 19 bp, Artificial Sequence
  Description of Artificial Sequence: Synthetic oligonucleotide
ctgaccgatagatgatccg

SEQ ID NO: 3101 - DNA, 19 bp, Artificial Sequence
  Description of Artificial Sequence: Synthetic oligonucleotide
tctgaccgatagatgatcc

SEQ ID NO: 3102 - DNA, 19 bp, Artificial Sequence
  Description of Artificial Sequence: Synthetic oligonucleotide
gtctgaccgatagatgatc

SEQ ID NO: 3103 - DNA, 19 bp, Artificial Sequence
  Description of Artificial Sequence: Synthetic oligonucleotide
cgtctgaccgatagatgat

SEQ ID NO: 3104 - DNA, 19 bp, Artificial Sequence
  Description of Artificial Sequence: Synthetic oligonucleotide
tcgtctgaccgatagatga

SEQ ID NO: 3105 - DNA, 19 bp, Artificial Sequence
  Description of Artificial Sequence: Synthetic oligonucleotide
ctcgtctgaccgatagatg

SEQ ID NO: 3106 - DNA, 19 bp, Artificial Sequence
  Description of Artificial Sequence: Synthetic oligonucleotide
gctcgtctgaccgatagat

SEQ ID NO: 3107 - DNA, 19 bp, Artificial Sequence
  Description of Artificial Sequence: Synthetic oligonucleotide
tgctcgtctgaccgataga

SEQ ID NO: 3108 - DNA, 19 bp, Artificial Sequence
  Description of Artificial Sequence: Synthetic oligonucleotide
gtgctcgtctgaccgatag

SEQ ID NO: 3109 - DNA, 19 bp, Artificial Sequence
  Description of Artificial Sequence: Synthetic oligonucleotide
ggtgctcgtctgaccgata

SEQ ID NO: 3110 - DNA, 19 bp, Artificial Sequence
  Description of Artificial Sequence: Synthetic oligonucleotide
tggtgctcgtctgaccgat

SEQ ID NO: 3111 - DNA, 19 bp, Artificial Sequence
  Description of Artificial Sequence: Synthetic oligonucleotide
gtggtgctcgtctgaccga

SEQ ID NO: 3112 - DNA, 19 bp, Artificial Sequence
  Description of Artificial Sequence: Synthetic oligonucleotide
ggtggtgctcgtctgaccg

SEQ ID NO: 3113 - DNA, 19 bp, Artificial Sequence
  Description of Artificial Sequence: Synthetic oligonucleotide
gggtggtgctcgtctgacc

SEQ ID NO: 3114 - DNA, 19 bp, Artificial Sequence
  Description of Artificial Sequence: Synthetic oligonucleotide
agggtggtgctcgtctgac

SEQ ID NO: 3115 - DNA, 19 bp, Artificial Sequence
  Description of Artificial Sequence: Synthetic oligonucleotide
gagggtggtgctcgtctga

SEQ ID NO: 3116 - DNA, 19 bp, Artificial Sequence
  Description of Artificial Sequence: Synthetic oligonucleotide
ggagggtggtgctcgtctg

SEQ ID NO: 3117 - DNA, 19 bp, Artificial Sequence
  Description of Artificial Sequence: Synthetic oligonucleotide
gggagggtggtgctcgtct

SEQ ID NO: 3118 - DNA, 19 bp, Artificial Sequence
  Description of Artificial Sequence: Synthetic oligonucleotide
tgggagggtggtgctcgtc

SEQ ID NO: 3119 - DNA, 19 bp, Artificial Sequence
  Description of Artificial Sequence: Synthetic oligonucleotide
atgggagggtggtgctcgt

SEQ ID NO: 3120 - DNA, 19 bp, Artificial Sequence
  Description of Artificial Sequence: Synthetic oligonucleotide
gatgggagggtggtgctcg

SEQ ID NO: 3121 - DNA, 19 bp, Artificial Sequence
  Description of Artificial Sequence: Synthetic oligonucleotide
ggatgggagggtggtgctc

SEQ ID NO: 3122 - DNA, 19 bp, Artificial Sequence
  Description of Artificial Sequence: Synthetic oligonucleotide
aggatgggagggtggtgct

SEQ ID NO: 3123 - DNA, 19 bp, Artificial Sequence
  Description of Artificial Sequence: Synthetic oligonucleotide
caggatgggagggtggtgc

SEQ ID NO: 3124 - DNA, 19 bp, Artificial Sequence
  Description of Artificial Sequence: Synthetic oligonucleotide
gcaggatgggagggtggtg

SEQ ID NO: 3125 - DNA, 19 bp, Artificial Sequence
  Description of Artificial Sequence: Synthetic oligonucleotide
ggcaggatgggagggtggt

SEQ ID NO: 3126 - DNA, 19 bp, Artificial Sequence
  Description of Artificial Sequence: Synthetic oligonucleotide
gggcaggatgggagggtgg

SEQ ID NO: 3127 - DNA, 19 bp, Artificial Sequence
  Description of Artificial Sequence: Synthetic oligonucleotide
ggggcaggatgggagggtg

SEQ ID NO: 3128 - DNA, 19 bp, Artificial Sequence
  Description of Artificial Sequence: Synthetic oligonucleotide
gggggcaggatgggagggt

SEQ ID NO: 3129 - DNA, 19 bp, Artificial Sequence
  Description of Artificial Sequence: Synthetic oligonucleotide
tgggggcaggatgggaggg

SEQ ID NO: 3130 - DNA, 19 bp, Artificial Sequence
  Description of Artificial Sequence: Synthetic oligonucleotide
ttgggggcaggatgggagg

SEQ ID NO: 3131 - DNA, 19 bp, Artificial Sequence
  Description of Artificial Sequence: Synthetic oligonucleotide
tttgggggcaggatgggag

SEQ ID NO: 3132 - DNA, 19 bp, Artificial Sequence
  Description of Artificial Sequence: Synthetic oligonucleotide
ctttgggggcaggatggga

SEQ ID NO: 3133 - DNA, 19 bp, Artificial Sequence
  Description of Artificial Sequence: Synthetic oligonucleotide
cctttgggggcaggatggg

SEQ ID NO: 3134 - DNA, 19 bp, Artificial Sequence
  Description of Artificial Sequence: Synthetic oligonucleotide
gcctttgggggcaggatgg

SEQ ID NO: 3135 - DNA, 19 bp, Artificial Sequence
  Description of Artificial Sequence: Synthetic oligonucleotide
tgcctttgggggcaggatg

SEQ ID NO: 3136 - DNA, 19 bp, Artificial Sequence
  Description of Artificial Sequence: Synthetic oligonucleotide
ctgcctttgggggcaggat

SEQ ID NO: 3137 - DNA, 19 bp, Artificial Sequence
  Description of Artificial Sequence: Synthetic oligonucleotide
tctgcctttgggggcagga

SEQ ID NO: 3138 - DNA, 19 bp, Artificial Sequence
  Description of Artificial Sequence: Synthetic oligonucleotide
gtctgcctttgggggcagg

SEQ ID NO: 3139 - DNA, 19 bp, Artificial Sequence
  Description of Artificial Sequence: Synthetic oligonucleotide
ggtctgcctttgggggcag

SEQ ID NO: 3140 - DNA, 19 bp, Artificial Sequence
  Description of Artificial Sequence: Synthetic oligonucleotide
aggtctgcctttgggggca

SEQ ID NO: 3141 - DNA, 19 bp, Artificial Sequence
  Description of Artificial Sequence: Synthetic oligonucleotide
caggtctgcctttgggggc

SEQ ID NO: 3142 - DNA, 19 bp, Artificial Sequence
  Description of Artificial Sequence: Synthetic oligonucleotide
tcaggtctgcctttggggg

SEQ ID NO: 3143 - DNA, 19 bp, Artificial Sequence
  Description of Artificial Sequence: Synthetic oligonucleotide
gtcaggtctgcctttgggg

SEQ ID NO: 3144 - DNA, 19 bp, Artificial Sequence
  Description of Artificial Sequence: Synthetic oligonucleotide
ggtcaggtctgcctttggg

SEQ ID NO: 3145 - DNA, 19 bp, Artificial Sequence
  Description of Artificial Sequence: Synthetic oligonucleotide
tggtcaggtctgcctttgg

SEQ ID NO: 3146 - DNA, 19 bp, Artificial Sequence
  Description of Artificial Sequence: Synthetic oligonucleotide
atggtcaggtctgcctttg

SEQ ID NO: 3147 - DNA, 19 bp, Artificial Sequence
  Description of Artificial Sequence: Synthetic oligonucleotide
gatggtcaggtctgccttt

SEQ ID NO: 3148 - DNA, 19 bp, Artificial Sequence
  Description of Artificial Sequence: Synthetic oligonucleotide
cgatggtcaggtctgcctt

SEQ ID NO: 3149 - DNA, 19 bp, Artificial Sequence
  Description of Artificial Sequence: Synthetic oligonucleotide
ccgatggtcaggtctgcct

SEQ ID NO: 3150 - DNA, 19 bp, Artificial Sequence
  Description of Artificial Sequence: Synthetic oligonucleotide
gccgatggtcaggtctgcc

SEQ ID NO: 3151 - DNA, 19 bp, Artificial Sequence
  Description of Artificial Sequence: Synthetic oligonucleotide
ggccgatggtcaggtctgc

SEQ ID NO: 3152 - DNA, 19 bp, Artificial Sequence
  Description of Artificial Sequence: Synthetic oligonucleotide
aggccgatggtcaggtctg

SEQ ID NO: 3153 - DNA, 19 bp, Artificial Sequence
  Description of Artificial Sequence: Synthetic oligonucleotide
caggccgatggtcaggtct

SEQ ID NO: 3154 - DNA, 19 bp, Artificial Sequence
  Description of Artificial Sequence: Synthetic oligonucleotide
gcaggccgatggtcaggtc

SEQ ID NO: 3155 - DNA, 19 bp, Artificial Sequence
  Description of Artificial Sequence: Synthetic oligonucleotide
tgcaggccgatggtcaggt

SEQ ID NO: 3156 - DNA, 19 bp, Artificial Sequence
  Description of Artificial Sequence: Synthetic oligonucleotide
gtgcaggccgatggtcagg

SEQ ID NO: 3157 - DNA, 19 bp, Artificial Sequence
  Description of Artificial Sequence: Synthetic oligonucleotide
cgtgcaggccgatggtcag

SEQ ID NO: 3158 - DNA, 19 bp, Artificial Sequence
  Description of Artificial Sequence: Synthetic oligonucleotide
ccgtgcaggccgatggtca

SEQ ID NO: 3159 - DNA, 19 bp, Artificial Sequence
  Description of Artificial Sequence: Synthetic oligonucleotide
cccgtgcaggccgatggtc

SEQ ID NO: 3160 - DNA, 19 bp, Artificial Sequence
  Description of Artificial Sequence: Synthetic oligonucleotide
ccccgtgcaggccgatggt

SEQ ID NO: 3161 - DNA, 19 bp, Artificial Sequence
  Description of Artificial Sequence: Synthetic oligonucleotide
tccccgtgcaggccgatgg

SEQ ID NO: 3162 - DNA, 19 bp, Artificial Sequence
  Description of Artificial Sequence: Synthetic oligonucleotide
ctccccgtgcaggccgatg

SEQ ID NO: 3163 - DNA, 19 bp, Artificial Sequence
  Description of Artificial Sequence: Synthetic oligonucleotide
actccccgtgcaggccgat

SEQ ID NO: 3164 - DNA, 19 bp, Artificial Sequence
  Description of Artificial Sequence: Synthetic oligonucleotide
cactccccgtgcaggccga

SEQ ID NO: 3165 - DNA, 19 bp, Artificial Sequence
  Description of Artificial Sequence: Synthetic oligonucleotide
ccactccccgtgcaggccg

SEQ ID NO: 3166 - DNA, 19 bp, Artificial Sequence
  Description of Artificial Sequence: Synthetic oligonucleotide
cccactccccgtgcaggcc

SEQ ID NO: 3167 - DNA, 19 bp, Artificial Sequence
  Description of Artificial Sequence: Synthetic oligonucleotide
acccactccccgtgcaggc

SEQ ID NO: 3168 - DNA, 19 bp, Artificial Sequence
  Description of Artificial Sequence: Synthetic oligonucleotide
cacccactccccgtgcagg

SEQ ID NO: 3169 - DNA, 19 bp, Artificial Sequence
  Description of Artificial Sequence: Synthetic oligonucleotide
tcacccactccccgtgcag

SEQ ID NO: 3170 - DNA, 19 bp, Artificial Sequence
  Description of Artificial Sequence: Synthetic oligonucleotide
ctcacccactccccgtgca

SEQ ID NO: 3171 - DNA, 19 bp, Artificial Sequence
  Description of Artificial Sequence: Synthetic oligonucleotide
gctcacccactccccgtgc

SEQ ID NO: 3172 - DNA, 19 bp, Artificial Sequence
  Description of Artificial Sequence: Synthetic oligonucleotide
ggctcacccactccccgtg

SEQ ID NO: 3173 - DNA, 19 bp, Artificial Sequence
  Description of Artificial Sequence: Synthetic oligonucleotide
tggctcacccactccccgt

SEQ ID NO: 3174 - DNA, 19 bp, Artificial Sequence
  Description of Artificial Sequence: Synthetic oligonucleotide
ctggctcacccactccccg

SEQ ID NO: 3175 - DNA, 19 bp, Artificial Sequence
  Description of Artificial Sequence: Synthetic oligonucleotide
gctggctcacccactcccc

SEQ ID NO: 3176 - DNA, 19 bp, Artificial Sequence
  Description of Artificial Sequence: Synthetic oligonucleotide
cgctggctcacccactccc

SEQ ID NO: 3177 - DNA, 19 bp, Artificial Sequence
  Description of Artificial Sequence: Synthetic oligonucleotide
gcgctggctcacccactcc

SEQ ID NO: 3178 - DNA, 19 bp, Artificial Sequence
  Description of Artificial Sequence: Synthetic oligonucleotide
agcgctggctcacccactc

SEQ ID NO: 3179 - DNA, 19 bp, Artificial Sequence
  Description of Artificial Sequence: Synthetic oligonucleotide
cagcgctggctcacccact

SEQ ID NO: 3180 - DNA, 19 bp, Artificial Sequence
  Description of Artificial Sequence: Synthetic oligonucleotide
acagcgctggctcacccac

SEQ ID NO: 3181 - DNA, 19 bp, Artificial Sequence
  Description of Artificial Sequence: Synthetic oligonucleotide
cacagcgctggctcaccca

SEQ ID NO: 3182 - DNA, 19 bp, Artificial Sequence
  Description of Artificial Sequence: Synthetic oligonucleotide
tcacagcgctggctcaccc

SEQ ID NO: 3183 - DNA, 19 bp, Artificial Sequence
  Description of Artificial Sequence: Synthetic oligonucleotide
ctcacagcgctggctcacc

SEQ ID NO: 3184 - DNA, 19 bp, Artificial Sequence
  Description of Artificial Sequence: Synthetic oligonucleotide
cctcacagcgctggctcac

SEQ ID NO: 3185 - DNA, 19 bp, Artificial Sequence
  Description of Artificial Sequence: Synthetic oligonucleotide
acctcacagcgctggctca

SEQ ID NO: 3186 - DNA, 19 bp, Artificial Sequence
  Description of Artificial Sequence: Synthetic oligonucleotide
cacctcacagcgctggctc

SEQ ID NO: 3187 - DNA, 19 bp, Artificial Sequence
  Description of Artificial Sequence: Synthetic oligonucleotide
gcacctcacagcgctggct

SEQ ID NO: 3188 - DNA, 19 bp, Artificial Sequence
  Description of Artificial Sequence: Synthetic oligonucleotide
cgcacctcacagcgctggc

SEQ ID NO: 3189 - DNA, 19 bp, Artificial Sequence
  Description of Artificial Sequence: Synthetic oligonucleotide
gcgcacctcacagcgctgg

SEQ ID NO: 3190 - DNA, 19 bp, Artificial Sequence
  Description of Artificial Sequence: Synthetic oligonucleotide
ggcgcacctcacagcgctg

SEQ ID NO: 3191 - DNA, 19 bp, Artificial Sequence
  Description of Artificial Sequence: Synthetic oligonucleotide
gggcgcacctcacagcgct

SEQ ID NO: 3192 - DNA, 19 bp, Artificial Sequence
  Description of Artificial Sequence: Synthetic oligonucleotide
ggggcgcacctcacagcgc

SEQ ID NO: 3193 - DNA, 19 bp, Artificial Sequence
  Description of Artificial Sequence: Synthetic oligonucleotide
cggggcgcacctcacagcg

SEQ ID NO: 3194 - DNA, 19 bp, Artificial Sequence
  Description of Artificial Sequence: Synthetic oligonucleotide
tcggggcgcacctcacagc

SEQ ID NO: 3195 - DNA, 19 bp, Artificial Sequence
  Description of Artificial Sequence: Synthetic oligonucleotide
ttcggggcgcacctcacag

SEQ ID NO: 3196 - DNA, 19 bp, Artificial Sequence
  Description of Artificial Sequence: Synthetic oligonucleotide
cttcggggcgcacctcaca

SEQ ID NO: 3197 - DNA, 19 bp, Artificial Sequence
  Description of Artificial Sequence: Synthetic oligonucleotide
acttcggggcgcacctcac

SEQ ID NO: 3198 - DNA, 19 bp, Artificial Sequence
  Description of Artificial Sequence: Synthetic oligonucleotide
gacttcggggcgcacctca

SEQ ID NO: 3199 - DNA, 19 bp, Artificial Sequence
  Description of Artificial Sequence: Synthetic oligonucleotide
ggacttcggggcgcacctc

SEQ ID NO: 3200 - DNA, 19 bp, Artificial Sequence
  Description of Artificial Sequence: Synthetic oligonucleotide
aggacttcggggcgcacct

SEQ ID NO: 3201 - DNA, 19 bp, Artificial Sequence
  Description of Artificial Sequence: Synthetic oligonucleotide
gaggacttcggggcgcacc

SEQ ID NO: 3202 - DNA, 19 bp, Artificial Sequence
  Description of Artificial Sequence: Synthetic oligonucleotide
agaggacttcggggcgcac

SEQ ID NO: 3203 - DNA, 19 bp, Artificial Sequence
  Description of Artificial Sequence: Synthetic oligonucleotide
aagaggacttcggggcgca

SEQ ID NO: 3204 - DNA, 19 bp, Artificial Sequence
  Description of Artificial Sequence: Synthetic oligonucleotide
gaagaggacttcggggcgc

SEQ ID NO: 3205 - DNA, 19 bp, Artificial Sequence
  Description of Artificial Sequence: Synthetic oligonucleotide
ggaagaggacttcggggcg

SEQ ID NO: 3206 - DNA, 19 bp, Artificial Sequence
  Description of Artificial Sequence: Synthetic oligonucleotide
aggaagaggacttcggggc

SEQ ID NO: 3207 - DNA, 19 bp, Artificial Sequence
  Description of Artificial Sequence: Synthetic oligonucleotide
gaggaagaggacttcgggg

SEQ ID NO: 3208 - DNA, 19 bp, Artificial Sequence
  Description of Artificial Sequence: Synthetic oligonucleotide
tgaggaagaggacttcggg

SEQ ID NO: 3209 - DNA, 19 bp, Artificial Sequence
  Description of Artificial Sequence: Synthetic oligonucleotide
gtgaggaagaggacttcgg

SEQ ID NO: 3210 - DNA, 19 bp, Artificial Sequence
  Description of Artificial Sequence: Synthetic oligonucleotide
ggtgaggaagaggacttcg

SEQ ID NO: 3211 - DNA, 19 bp, Artificial Sequence
  Description of Artificial Sequence: Synthetic oligonucleotide
gggtgaggaagaggacttc

SEQ ID NO: 3212 - DNA, 19 bp, Artificial Sequence
  Description of Artificial Sequence: Synthetic oligonucleotide
cgggtgaggaagaggactt

SEQ ID NO: 3213 - DNA, 19 bp, Artificial Sequence
  Description of Artificial Sequence: Synthetic oligonucleotide
gcgggtgaggaagaggact

SEQ ID NO: 3214 - DNA, 19 bp, Artificial Sequence
  Description of Artificial Sequence: Synthetic oligonucleotide
ggcgggtgaggaagaggac

SEQ ID NO: 3215 - DNA, 19 bp, Artificial Sequence
  Description of Artificial Sequence: Synthetic oligonucleotide
tggcgggtgaggaagagga

SEQ ID NO: 3216 - DNA, 19 bp, Artificial Sequence
  Description of Artificial Sequence: Synthetic oligonucleotide
gtggcgggtgaggaagagg

SEQ ID NO: 3217 - DNA, 19 bp, Artificial Sequence
  Description of Artificial Sequence: Synthetic oligonucleotide
agtggcgggtgaggaagag

SEQ ID NO: 3218 - DNA, 19 bp, Artificial Sequence
  Description of Artificial Sequence: Synthetic oligonucleotide
aagtggcgggtgaggaaga

SEQ ID NO: 3219 - DNA, 19 bp, Artificial Sequence
  Description of Artificial Sequence: Synthetic oligonucleotide
gaagtggcgggtgaggaag

SEQ ID NO: 3220 - DNA, 19 bp, Artificial Sequence
  Description of Artificial Sequence: Synthetic oligonucleotide
tgaagtggcgggtgaggaa

SEQ ID NO: 3221 - DNA, 19 bp, Artificial Sequence
  Description of Artificial Sequence: Synthetic oligonucleotide
atgaagtggcgggtgagga

SEQ ID NO: 3222 - DNA, 19 bp, Artificial Sequence
  Description of Artificial Sequence: Synthetic oligonucleotide
gatgaagtggcgggtgagg

SEQ ID NO: 3223 - DNA, 19 bp, Artificial Sequence
  Description of Artificial Sequence: Synthetic oligonucleotide
agatgaagtggcgggtgag

SEQ ID NO: 3224 - DNA, 19 bp, Artificial Sequence
  Description of Artificial Sequence: Synthetic oligonucleotide
aagatgaagtggcgggtga

SEQ ID NO: 3225 - DNA, 19 bp, Artificial Sequence
  Description of Artificial Sequence: Synthetic oligonucleotide
gaagatgaagtggcgggtg

SEQ ID NO: 3226 - DNA, 19 bp, Artificial Sequence
  Description of Artificial Sequence: Synthetic oligonucleotide
ggaagatgaagtggcgggt

SEQ ID NO: 3227 - DNA, 19 bp, Artificial Sequence
  Description of Artificial Sequence: Synthetic oligonucleotide
tggaagatgaagtggcggg

SEQ ID NO: 3228 - DNA, 19 bp, Artificial Sequence
  Description of Artificial Sequence: Synthetic oligonucleotide
atggaagatgaagtggcgg

SEQ ID NO: 3229 - DNA, 19 bp, Artificial Sequence
  Description of Artificial Sequence: Synthetic oligonucleotide
catggaagatgaagtggcg

SEQ ID NO: 3230 - DNA, 19 bp, Artificial Sequence
  Description of Artificial Sequence: Synthetic oligonucleotide
tcatggaagatgaagtggc

SEQ ID NO: 3231 - DNA, 19 bp, Artificial Sequence
  Description of Artificial Sequence: Synthetic oligonucleotide
gtcatggaagatgaagtgg

SEQ ID NO: 3232 - DNA, 19 bp, Artificial Sequence
  Description of Artificial Sequence: Synthetic oligonucleotide
tgtcatggaagatgaagtg

SEQ ID NO: 3233 - DNA, 19 bp, Artificial Sequence
  Description of Artificial Sequence: Synthetic oligonucleotide
ttgtcatggaagatgaagt

SEQ ID NO: 3234 - DNA, 19 bp, Artificial Sequence
  Description of Artificial Sequence: Synthetic oligonucleotide
gttgtcatggaagatgaag

SEQ ID NO: 3235 - DNA, 19 bp, Artificial Sequence
  Description of Artificial Sequence: Synthetic oligonucleotide
tgttgtcatggaagatgaa

SEQ ID NO: 3236 - DNA, 19 bp, Artificial Sequence
  Description of Artificial Sequence: Synthetic oligonucleotide
ttgttgtcatggaagatga

SEQ ID NO: 3237 - DNA, 19 bp, Artificial Sequence
  Description of Artificial Sequence: Synthetic oligonucleotide
gttgttgtcatggaagatg

SEQ ID NO: 3238 - DNA, 19 bp, Artificial Sequence
  Description of Artificial Sequence: Synthetic oligonucleotide
tgttgttgtcatggaagat

SEQ ID NO: 3239 - DNA, 19 bp, Artificial Sequence
  Description of Artificial Sequence: Synthetic oligonucleotide
ttgttgttgtcatggaaga

SEQ ID NO: 3240 - DNA, 19 bp, Artificial Sequence
  Description of Artificial Sequence: Synthetic oligonucleotide
gttgttgttgtcatggaag

SEQ ID NO: 3241 - DNA, 19 bp, Artificial Sequence
  Description of Artificial Sequence: Synthetic oligonucleotide
tgttgttgttgtcatggaa

SEQ ID NO: 3242 - DNA, 19 bp, Artificial Sequence
  Description of Artificial Sequence: Synthetic oligonucleotide
gtgttgttgttgtcatgga

SEQ ID NO: 3243 - DNA, 19 bp, Artificial Sequence
  Description of Artificial Sequence: Synthetic oligonucleotide
ggtgttgttgttgtcatgg

SEQ ID NO: 3244 - DNA, 19 bp, Artificial Sequence
  Description of Artificial Sequence: Synthetic oligonucleotide
aggtgttgttgttgtcatg

SEQ ID NO: 3245 - DNA, 19 bp, Artificial Sequence
  Description of Artificial Sequence: Synthetic oligonucleotide
caggtgttgttgttgtcat

SEQ ID NO: 3246 - DNA, 19 bp, Artificial Sequence
  Description of Artificial Sequence: Synthetic oligonucleotide
ccaggtgttgttgttgtca

SEQ ID NO: 3247 - DNA, 19 bp, Artificial Sequence
  Description of Artificial Sequence: Synthetic oligonucleotide
cccaggtgttgttgttgtc

SEQ ID NO: 3248 - DNA, 19 bp, Artificial Sequence
  Description of Artificial Sequence: Synthetic oligonucleotide
tcccaggtgttgttgttgt

SEQ ID NO: 3249 - DNA, 19 bp, Artificial Sequence
  Description of Artificial Sequence: Synthetic oligonucleotide
ctcccaggtgttgttgttg

SEQ ID NO: 3250 - DNA, 19 bp, Artificial Sequence
  Description of Artificial Sequence: Synthetic oligonucleotide
cctcccaggtgttgttgtt

SEQ ID NO: 3251 - DNA, 19 bp, Artificial Sequence
  Description of Artificial Sequence: Synthetic oligonucleotide
ccctcccaggtgttgttgt

SEQ ID NO: 3252 - DNA, 19 bp, Artificial Sequence
  Description of Artificial Sequence: Synthetic oligonucleotide
gccctcccaggtgttgttg

SEQ ID NO: 3253 - DNA, 19 bp, Artificial Sequence
  Description of Artificial Sequence: Synthetic oligonucleotide
ggccctcccaggtgttgtt

SEQ ID NO: 3254 - DNA, 19 bp, Artificial Sequence
  Description of Artificial Sequence: Synthetic oligonucleotide
tggccctcccaggtgttgt

SEQ ID NO: 3255 - DNA, 19 bp, Artificial Sequence
  Description of Artificial Sequence: Synthetic oligonucleotide
gtggccctcccaggtgttg

SEQ ID NO: 3256 - DNA, 19 bp, Artificial Sequence
  Description of Artificial Sequence: Synthetic oligonucleotide
agtggccctcccaggtgtt

SEQ ID NO: 3257 - DNA, 19 bp, Artificial Sequence
  Description of Artificial Sequence: Synthetic oligonucleotide
tagtggccctcccaggtgt

SEQ ID NO: 3258 - DNA, 19 bp, Artificial Sequence
  Description of Artificial Sequence: Synthetic oligonucleotide
gtagtggccctcccaggtg

SEQ ID NO: 3259 - DNA, 19 bp, Artificial Sequence
  Description of Artificial Sequence: Synthetic oligonucleotide
agtagtggccctcccaggt

SEQ ID NO: 3260 - DNA, 19 bp, Artificial Sequence
  Description of Artificial Sequence: Synthetic oligonucleotide
tagtagtggccctcccagg

SEQ ID NO: 3261 - DNA, 19 bp, Artificial Sequence
  Description of Artificial Sequence: Synthetic oligonucleotide
gtagtagtggccctcccag

SEQ ID NO: 3262 - DNA, 19 bp, Artificial Sequence
  Description of Artificial Sequence: Synthetic oligonucleotide
ggtagtagtggccctccca

SEQ ID NO: 3263 - DNA, 19 bp, Artificial Sequence
  Description of Artificial Sequence: Synthetic oligonucleotide
tggtagtagtggccctccc

SEQ ID NO: 3264 - DNA, 19 bp, Artificial Sequence
  Description of Artificial Sequence: Synthetic oligonucleotide
gtggtagtagtggccctcc

SEQ ID NO: 3265 - DNA, 19 bp, Artificial Sequence
  Description of Artificial Sequence: Synthetic oligonucleotide
agtggtagtagtggccctc

SEQ ID NO: 3266 - DNA, 19 bp, Artificial Sequence
  Description of Artificial Sequence: Synthetic oligonucleotide
tagtggtagtagtggccct

SEQ ID NO: 3267 - DNA, 19 bp, Artificial Sequence
  Description of Artificial Sequence: Synthetic oligonucleotide
gtagtggtagtagtggccc

SEQ ID NO: 3268 - DNA, 19 bp, Artificial Sequence
  Description of Artificial Sequence: Synthetic oligonucleotide
agtagtggtagtagtggcc

SEQ ID NO: 3269 - DNA, 19 bp, Artificial Sequence
  Description of Artificial Sequence: Synthetic oligonucleotide
gagtagtggtagtagtggc

SEQ ID NO: 3270 - DNA, 19 bp, Artificial Sequence
  Description of Artificial Sequence: Synthetic oligonucleotide
tgagtagtggtagtagtgg

SEQ ID NO: 3271 - DNA, 19 bp, Artificial Sequence
  Description of Artificial Sequence: Synthetic oligonucleotide
ctgagtagtggtagtagtg

SEQ ID NO: 3272 - DNA, 19 bp, Artificial Sequence
  Description of Artificial Sequence: Synthetic oligonucleotide
tctgagtagtggtagtagt

SEQ ID NO: 3273 - DNA, 19 bp, Artificial Sequence
  Description of Artificial Sequence: Synthetic oligonucleotide
gtctgagtagtggtagtag

SEQ ID NO: 3274 - DNA, 19 bp, Artificial Sequence
  Description of Artificial Sequence: Synthetic oligonucleotide
ggtctgagtagtggtagta

SEQ ID NO: 3275 - DNA, 19 bp, Artificial Sequence
  Description of Artificial Sequence: Synthetic oligonucleotide
gggtctgagtagtggtagt

SEQ ID NO: 3276 - DNA, 19 bp, Artificial Sequence
  Description of Artificial Sequence: Synthetic oligonucleotide
cgggtctgagtagtggtag

SEQ ID NO: 3277 - DNA, 19 bp, Artificial Sequence
  Description of Artificial Sequence: Synthetic oligonucleotide
ccgggtctgagtagtggta

SEQ ID NO: 3278 - DNA, 19 bp, Artificial Sequence
  Description of Artificial Sequence: Synthetic oligonucleotide
accgggtctgagtagtggt

SEQ ID NO: 3279 - DNA, 19 bp, Artificial Sequence
  Description of Artificial Sequence: Synthetic oligonucleotide
caccgggtctgagtagtgg

SEQ ID NO: 3280 - DNA, 19 bp, Artificial Sequence
  Description of Artificial Sequence: Synthetic oligonucleotide
acaccgggtctgagtagtg

SEQ ID NO: 3281 - DNA, 19 bp, Artificial Sequence
  Description of Artificial Sequence: Synthetic oligonucleotide
cacaccgggtctgagtagt

SEQ ID NO: 3282 - DNA, 19 bp, Artificial Sequence
  Description of Artificial Sequence: Synthetic oligonucleotide
gcacaccgggtctgagtag

SEQ ID NO: 3283 - DNA, 19 bp, Artificial Sequence
  Description of Artificial Sequence: Synthetic oligonucleotide
tgcacaccgggtctgagta

SEQ ID NO: 3284 - DNA, 19 bp, Artificial Sequence
  Description of Artificial Sequence: Synthetic oligonucleotide
ttgcacaccgggtctgagt

SEQ ID NO: 3285 - DNA, 19 bp, Artificial Sequence
  Description of Artificial Sequence: Synthetic oligonucleotide
cttgcacaccgggtctgag

SEQ ID NO: 3286 - DNA, 19 bp, Artificial Sequence
  Description of Artificial Sequence: Synthetic oligonucleotide
gcttgcacaccgggtctga

SEQ ID NO: 3287 - DNA, 19 bp, Artificial Sequence
  Description of Artificial Sequence: Synthetic oligonucleotide
tgcttgcacaccgggtctg

SEQ ID NO: 3288 - DNA, 19 bp, Artificial Sequence
  Description of Artificial Sequence: Synthetic oligonucleotide
gtgcttgcacaccgggtct

SEQ ID NO: 3289 - DNA, 19 bp, Artificial Sequence
  Description of Artificial Sequence: Synthetic oligonucleotide
ggtgcttgcacaccgggtc

SEQ ID NO: 3290 - DNA, 19 bp, Artificial Sequence
  Description of Artificial Sequence: Synthetic oligonucleotide
gggtgcttgcacaccgggt

SEQ ID NO: 3291 - DNA, 19 bp, Artificial Sequence
  Description of Artificial Sequence: Synthetic oligonucleotide
ggggtgcttgcacaccggg

SEQ ID NO: 3292 - DNA, 19 bp, Artificial Sequence
  Description of Artificial Sequence: Synthetic oligonucleotide
tggggtgcttgcacaccgg

SEQ ID NO: 3293 - DNA, 19 bp, Artificial Sequence
  Description of Artificial Sequence: Synthetic oligonucleotide
gtggggtgcttgcacaccg

SEQ ID NO: 3294 - DNA, 19 bp, Artificial Sequence
  Description of Artificial Sequence: Synthetic oligonucleotide
ggtggggtgcttgcacacc

SEQ ID NO: 3295 - DNA, 19 bp, Artificial Sequence
  Description of Artificial Sequence: Synthetic oligonucleotide
aggtggggtgcttgcacac

SEQ ID NO: 3296 - DNA, 19 bp, Artificial Sequence
  Description of Artificial Sequence: Synthetic oligonucleotide
aaggtggggtgcttgcaca

SEQ ID NO: 3297 - DNA, 19 bp, Artificial Sequence
  Description of Artificial Sequence: Synthetic oligonucleotide
gaaggtggggtgcttgcac

SEQ ID NO: 3298 - DNA, 19 bp, Artificial Sequence
  Description of Artificial Sequence: Synthetic oligonucleotide
agaaggtggggtgcttgca

SEQ ID NO: 3299 - DNA, 19 bp, Artificial Sequence
  Description of Artificial Sequence: Synthetic oligonucleotide
gagaaggtggggtgcttgc

SEQ ID NO: 3300 - DNA, 19 bp, Artificial Sequence
  Description of Artificial Sequence: Synthetic oligonucleotide
ggagaaggtggggtgcttg

SEQ ID NO: 3301 - DNA, 19 bp, Artificial Sequence
  Description of Artificial Sequence: Synthetic oligonucleotide
tggagaaggtggggtgctt

SEQ ID NO: 3302 - DNA, 19 bp, Artificial Sequence
  Description of Artificial Sequence: Synthetic oligonucleotide
atggagaaggtggggtgct

SEQ ID NO: 3303 - DNA, 19 bp, Artificial Sequence
  Description of Artificial Sequence: Synthetic oligonucleotide
gatggagaaggtggggtgc

SEQ ID NO: 3304 - DNA, 19 bp, Artificial Sequence
  Description of Artificial Sequence: Synthetic oligonucleotide
agatggagaaggtggggtg

SEQ ID NO: 3305 - DNA, 19 bp, Artificial Sequence
  Description of Artificial Sequence: Synthetic oligonucleotide
tagatggagaaggtggggt

SEQ ID NO: 3306 - DNA, 19 bp, Artificial Sequence
  Description of Artificial Sequence: Synthetic oligonucleotide
gtagatggagaaggtgggg

SEQ ID NO: 3307 - DNA, 19 bp, Artificial Sequence
  Description of Artificial Sequence: Synthetic oligonucleotide
cgtagatggagaaggtggg

SEQ ID NO: 3308 - DNA, 19 bp, Artificial Sequence
  Description of Artificial Sequence: Synthetic oligonucleotide
gcgtagatggagaaggtgg

SEQ ID NO: 3309 - DNA, 19 bp, Artificial Sequence
  Description of Artificial Sequence: Synthetic oligonucleotide
ggcgtagatggagaaggtg

SEQ ID NO: 3310 - DNA, 19 bp, Artificial Sequence
  Description of Artificial Sequence: Synthetic oligonucleotide
gggcgtagatggagaaggt

SEQ ID NO: 3311 - DNA, 19 bp, Artificial Sequence
  Description of Artificial Sequence: Synthetic oligonucleotide
cgggcgtagatggagaagg

SEQ ID NO: 3312 - DNA, 19 bp, Artificial Sequence
  Description of Artificial Sequence: Synthetic oligonucleotide
ccgggcgtagatggagaag

SEQ ID NO: 3313 - DNA, 19 bp, Artificial Sequence
  Description of Artificial Sequence: Synthetic oligonucleotide
cccgggcgtagatggagaa

SEQ ID NO: 3314 - DNA, 19 bp, Artificial Sequence
  Description of Artificial Sequence: Synthetic oligonucleotide
ccccgggcgtagatggaga

SEQ ID NO: 3315 - DNA, 19 bp, Artificial Sequence
  Description of Artificial Sequence: Synthetic oligonucleotide
gccccgggcgtagatggag

SEQ ID NO: 3316 - DNA, 19 bp, Artificial Sequence
  Description of Artificial Sequence: Synthetic oligonucleotide
ggccccgggcgtagatgga

SEQ ID NO: 3317 - DNA, 19 bp, Artificial Sequence
  Description of Artificial Sequence: Synthetic oligonucleotide
cggccccgggcgtagatgg

SEQ ID NO: 3318 - DNA, 19 bp, Artificial Sequence
  Description of Artificial Sequence: Synthetic oligonucleotide
gcggccccgggcgtagatg

SEQ ID NO: 3319 - DNA, 19 bp, Artificial Sequence
  Description of Artificial Sequence: Synthetic oligonucleotide
agcggccccgggcgtagat

SEQ ID NO: 3320 - DNA, 19 bp, Artificial Sequence
  Description of Artificial Sequence: Synthetic oligonucleotide
tagcggccccgggcgtaga

SEQ ID NO: 3321 - DNA, 19 bp, Artificial Sequence
  Description of Artificial Sequence: Synthetic oligonucleotide
gtagcggccccgggcgtag

SEQ ID NO: 3322 - DNA, 19 bp, Artificial Sequence
  Description of Artificial Sequence: Synthetic oligonucleotide
tgtagcggccccgggcgta

SEQ ID NO: 3323 - DNA, 19 bp, Artificial Sequence
  Description of Artificial Sequence: Synthetic oligonucleotide
ctgtagcggccccgggcgt

SEQ ID NO: 3324 - DNA, 19 bp, Artificial Sequence
  Description of Artificial Sequence: Synthetic oligonucleotide
gctgtagcggccccgggcg

SEQ ID NO: 3325 - DNA, 19 bp, Artificial Sequence
  Description of Artificial Sequence: Synthetic oligonucleotide
ggctgtagcggccccgggc

SEQ ID NO: 3326 - DNA, 19 bp, Artificial Sequence
  Description of Artificial Sequence: Synthetic oligonucleotide
cggctgtagcggccccggg

SEQ ID NO: 3327 - DNA, 19 bp, Artificial Sequence
  Description of Artificial Sequence: Synthetic oligonucleotide
gcggctgtagcggccccgg

SEQ ID NO: 3328 - DNA, 19 bp, Artificial Sequence
  Description of Artificial Sequence: Synthetic oligonucleotide
cgcggctgtagcggccccg

SEQ ID NO: 3329 - DNA, 19 bp, Artificial Sequence
  Description of Artificial Sequence: Synthetic oligonucleotide
ccgcggctgtagcggcccc

SEQ ID NO: 3330 - DNA, 19 bp, Artificial Sequence
  Description of Artificial Sequence: Synthetic oligonucleotide
gccgcggctgtagcggccc

SEQ ID NO: 3331 - DNA, 19 bp, Artificial Sequence
  Description of Artificial Sequence: Synthetic oligonucleotide
cgccgcggctgtagcggcc

SEQ ID NO: 3332 - DNA, 19 bp, Artificial Sequence
  Description of Artificial Sequence: Synthetic oligonucleotide
acgccgcggctgtagcggc

SEQ ID NO: 3333 - DNA, 19 bp, Artificial Sequence
  Description of Artificial Sequence: Synthetic oligonucleotide
gacgccgcggctgtagcgg

SEQ ID NO: 3334 - DNA, 19 bp, Artificial Sequence
  Description of Artificial Sequence: Synthetic oligonucleotide
ggacgccgcggctgtagcg

SEQ ID NO: 3335 - DNA, 19 bp, Artificial Sequence
  Description of Artificial Sequence: Synthetic oligonucleotide
aggacgccgcggctgtagc

SEQ ID NO: 3336 - DNA, 19 bp, Artificial Sequence
  Description of Artificial Sequence: Synthetic oligonucleotide
gaggacgccgcggctgtag

SEQ ID NO: 3337 - DNA, 19 bp, Artificial Sequence
  Description of Artificial Sequence: Synthetic oligonucleotide
agaggacgccgcggctgta

SEQ ID NO: 3338 - DNA, 19 bp, Artificial Sequence
  Description of Artificial Sequence: Synthetic oligonucleotide
gagaggacgccgcggctgt

SEQ ID NO: 3339 - DNA, 19 bp, Artificial Sequence
  Description of Artificial Sequence: Synthetic oligonucleotide
cgagaggacgccgcggctg

SEQ ID NO: 3340 - DNA, 19 bp, Artificial Sequence
  Description of Artificial Sequence: Synthetic oligonucleotide
acgagaggacgccgcggct

SEQ ID NO: 3341 - DNA, 19 bp, Artificial Sequence
  Description of Artificial Sequence: Synthetic oligonucleotide
gacgagaggacgccgcggc

SEQ ID NO: 3342 - DNA, 19 bp, Artificial Sequence
  Description of Artificial Sequence: Synthetic oligonucleotide
ggacgagaggacgccgcgg

SEQ ID NO: 3343 - DNA, 19 bp, Artificial Sequence
  Description of Artificial Sequence: Synthetic oligonucleotide
tggacgagaggacgccgcg

SEQ ID NO: 3344 - DNA, 19 bp, Artificial Sequence
  Description of Artificial Sequence: Synthetic oligonucleotide
ctggacgagaggacgccgc

SEQ ID NO: 3345 - DNA, 19 bp, Artificial Sequence
  Description of Artificial Sequence: Synthetic oligonucleotide
cctggacgagaggacgccg

SEQ ID NO: 3346 - DNA, 19 bp, Artificial Sequence
  Description of Artificial Sequence: Synthetic oligonucleotide
ccctggacgagaggacgcc

SEQ ID NO: 3347 - DNA, 19 bp, Artificial Sequence
  Description of Artificial Sequence: Synthetic oligonucleotide
accctggacgagaggacgc

SEQ ID NO: 3348 - DNA, 19 bp, Artificial Sequence
  Description of Artificial Sequence: Synthetic oligonucleotide
gaccctggacgagaggacg

SEQ ID NO: 3349 - DNA, 19 bp, Artificial Sequence
  Description of Artificial Sequence: Synthetic oligonucleotide
tgaccctggacgagaggac

SEQ ID NO: 3350 - DNA, 19 bp, Artificial Sequence
  Description of Artificial Sequence: Synthetic oligonucleotide
atgaccctggacgagagga

SEQ ID NO: 3351 - DNA, 19 bp, Artificial Sequence
  Description of Artificial Sequence: Synthetic oligonucleotide
catgaccctggacgagagg

SEQ ID NO: 3352 - DNA, 19 bp, Artificial Sequence
  Description of Artificial Sequence: Synthetic oligonucleotide
ccatgaccctggacgagag

SEQ ID NO: 3353 - DNA, 19 bp, Artificial Sequence
  Description of Artificial Sequence: Synthetic oligonucleotide
cccatgaccctggacgaga

SEQ ID NO: 3354 - DNA, 19 bp, Artificial Sequence
  Description of Artificial Sequence: Synthetic oligonucleotide
tcccatgaccctggacgag

SEQ ID NO: 3355 - DNA, 19 bp, Artificial Sequence
  Description of Artificial Sequence: Synthetic oligonucleotide
ctcccatgaccctggacga

SEQ ID NO: 3356 - DNA, 19 bp, Artificial Sequence
  Description of Artificial Sequence: Synthetic oligonucleotide
cctcccatgaccctggacg

SEQ ID NO: 3357 - DNA, 19 bp, Artificial Sequence
  Description of Artificial Sequence: Synthetic oligonucleotide
gcctcccatgaccctggac

SEQ ID NO: 3358 - DNA, 19 bp, Artificial Sequence
  Description of Artificial Sequence: Synthetic oligonucleotide
tgcctcccatgaccctgga

SEQ ID NO: 3359 - DNA, 19 bp, Artificial Sequence
  Description of Artificial Sequence: Synthetic oligonucleotide
gtgcctcccatgaccctgg

SEQ ID NO: 3360 - DNA, 19 bp, Artificial Sequence
  Description of Artificial Sequence: Synthetic oligonucleotide
ggtgcctcccatgaccctg

SEQ ID NO: 3361 - DNA, 19 bp, Artificial Sequence
  Description of Artificial Sequence: Synthetic oligonucleotide
cggtgcctcccatgaccct

SEQ ID NO: 3362 - DNA, 19 bp, Artificial Sequence
  Description of Artificial Sequence: Synthetic oligonucleotide
tcggtgcctcccatgaccc

SEQ ID NO: 3363 - DNA, 19 bp, Artificial Sequence
  Description of Artificial Sequence: Synthetic oligonucleotide
ctcggtgcctcccatgacc

SEQ ID NO: 3364 - DNA, 19 bp, Artificial Sequence
  Description of Artificial Sequence: Synthetic oligonucleotide
actcggtgcctcccatgac

SEQ ID NO: 3365 - DNA, 19 bp, Artificial Sequence
  Description of Artificial Sequence: Synthetic oligonucleotide
aactcggtgcctcccatga

SEQ ID NO: 3366 - DNA, 19 bp, Artificial Sequence
  Description of Artificial Sequence: Synthetic oligonucleotide
gaactcggtgcctcccatg

SEQ ID NO: 3367 - DNA, 19 bp, Artificial Sequence
  Description of Artificial Sequence: Synthetic oligonucleotide
cgaactcggtgcctcccat

SEQ ID NO: 3368 - DNA, 19 bp, Artificial Sequence
  Description of Artificial Sequence: Synthetic oligonucleotide
acgaactcggtgcctccca

SEQ ID NO: 3369 - DNA, 19 bp, Artificial Sequence
  Description of Artificial Sequence: Synthetic oligonucleotide
cacgaactcggtgcctccc

SEQ ID NO: 3370 - DNA, 19 bp, Artificial Sequence
  Description of Artificial Sequence: Synthetic oligonucleotide
acacgaactcggtgcctcc

SEQ ID NO: 3371 - DNA, 19 bp, Artificial Sequence
  Description of Artificial Sequence: Synthetic oligonucleotide
aacacgaactcggtgcctc

SEQ ID NO: 3372 - DNA, 19 bp, Artificial Sequence
  Description of Artificial Sequence: Synthetic oligonucleotide
gaacacgaactcggtgcct

SEQ ID NO: 3373 - DNA, 19 bp, Artificial Sequence
  Description of Artificial Sequence: Synthetic oligonucleotide
tgaacacgaactcggtgcc

SEQ ID NO: 3374 - DNA, 19 bp, Artificial Sequence
  Description of Artificial Sequence: Synthetic oligonucleotide
ttgaacacgaactcggtgc

SEQ ID NO: 3375 - DNA, 19 bp, Artificial Sequence
  Description of Artificial Sequence: Synthetic oligonucleotide
tttgaacacgaactcggtg

SEQ ID NO: 3376 - DNA, 19 bp, Artificial Sequence
  Description of Artificial Sequence: Synthetic oligonucleotide
ctttgaacacgaactcggt

SEQ ID NO: 3377 - DNA, 19 bp, Artificial Sequence
  Description of Artificial Sequence: Synthetic oligonucleotide
actttgaacacgaactcgg

SEQ ID NO: 3378 - DNA, 19 bp, Artificial Sequence
  Description of Artificial Sequence: Synthetic oligonucleotide
cactttgaacacgaactcg

SEQ ID NO: 3379 - DNA, 19 bp, Artificial Sequence
  Description of Artificial Sequence: Synthetic oligonucleotide
tcactttgaacacgaactc

SEQ ID NO: 3380 - DNA, 19 bp, Artificial Sequence
  Description of Artificial Sequence: Synthetic oligonucleotide
ttcactttgaacacgaact

SEQ ID NO: 3381 - DNA, 19 bp, Artificial Sequence
  Description of Artificial Sequence: Synthetic oligonucleotide
attcactttgaacacgaac

SEQ ID NO: 3382 - DNA, 19 bp, Artificial Sequence
  Description of Artificial Sequence: Synthetic oligonucleotide
gattcactttgaacacgaa

SEQ ID NO: 3383 - DNA, 19 bp, Artificial Sequence
  Description of Artificial Sequence: Synthetic oligonucleotide
tgattcactttgaacacga

SEQ ID NO: 3384 - DNA, 19 bp, Artificial Sequence
  Description of Artificial Sequence: Synthetic oligonucleotide
gtgattcactttgaacacg

SEQ ID NO: 3385 - DNA, 19 bp, Artificial Sequence
  Description of Artificial Sequence: Synthetic oligonucleotide
tgtgattcactttgaacac

SEQ ID NO: 3386 - DNA, 19 bp, Artificial Sequence
  Description of Artificial Sequence: Synthetic oligonucleotide
atgtgattcactttgaaca

SEQ ID NO: 3387 - DNA, 19 bp, Artificial Sequence
  Description of Artificial Sequence: Synthetic oligonucleotide
catgtgattcactttgaac

SEQ ID NO: 3388 - DNA, 19 bp, Artificial Sequence
  Description of Artificial Sequence: Synthetic oligonucleotide
tcatgtgattcactttgaa

SEQ ID NO: 3389 - DNA, 19 bp, Artificial Sequence
  Description of Artificial Sequence: Synthetic oligonucleotide
ttcatgtgattcactttga

SEQ ID NO: 3390 - DNA, 19 bp, Artificial Sequence
  Description of Artificial Sequence: Synthetic oligonucleotide
cttcatgtgattcactttg

SEQ ID NO: 3391 - DNA, 19 bp, Artificial Sequence
  Description of Artificial Sequence: Synthetic oligonucleotide
ccttcatgtgattcacttt

SEQ ID NO: 3392 - DNA, 19 bp, Artificial Sequence
  Description of Artificial Sequence: Synthetic oligonucleotide
accttcatgtgattcactt

SEQ ID NO: 3393 - DNA, 19 bp, Artificial Sequence
  Description of Artificial Sequence: Synthetic oligonucleotide
gaccttcatgtgattcact

SEQ ID NO: 3394 - DNA, 19 bp, Artificial Sequence
  Description of Artificial Sequence: Synthetic oligonucleotide
tgaccttcatgtgattcac

SEQ ID NO: 3395 - DNA, 19 bp, Artificial Sequence
  Description of Artificial Sequence: Synthetic oligonucleotide
gtgaccttcatgtgattca

SEQ ID NO: 3396 - DNA, 19 bp, Artificial Sequence
  Description of Artificial Sequence: Synthetic oligonucleotide
ggtgaccttcatgtgattc

SEQ ID NO: 3397 - DNA, 19 bp, Artificial Sequence
  Description of Artificial Sequence: Synthetic oligonucleotide
gggtgaccttcatgtgatt

SEQ ID NO: 3398 - DNA, 19 bp, Artificial Sequence
  Description of Artificial Sequence: Synthetic oligonucleotide
ggggtgaccttcatgtgat

SEQ ID NO: 3399 - DNA, 19 bp, Artificial Sequence
  Description of Artificial Sequence: Synthetic oligonucleotide
gggggtgaccttcatgtga

SEQ ID NO: 3400 - DNA, 19 bp, Artificial Sequence
  Description of Artificial Sequence: Synthetic oligonucleotide
tgggggtgaccttcatgtg

SEQ ID NO: 3401 - DNA, 19 bp, Artificial Sequence
  Description of Artificial Sequence: Synthetic oligonucleotide
atgggggtgaccttcatgt

SEQ ID NO: 3402 - DNA, 19 bp, Artificial Sequence
  Description of Artificial Sequence: Synthetic oligonucleotide
catgggggtgaccttcatg

SEQ ID NO: 3403 - DNA, 19 bp, Artificial Sequence
  Description of Artificial Sequence: Synthetic oligonucleotide
ccatgggggtgaccttcat

SEQ ID NO: 3404 - DNA, 19 bp, Artificial Sequence
  Description of Artificial Sequence: Synthetic oligonucleotide
tccatgggggtgaccttca

SEQ ID NO: 3405 - DNA, 19 bp, Artificial Sequence
  Description of Artificial Sequence: Synthetic oligonucleotide
atccatgggggtgaccttc

SEQ ID NO: 3406 - DNA, 19 bp, Artificial Sequence
  Description of Artificial Sequence: Synthetic oligonucleotide
catccatgggggtgacctt

SEQ ID NO: 3407 - DNA, 19 bp, Artificial Sequence
  Description of Artificial Sequence: Synthetic oligonucleotide
gcatccatgggggtgacct

SEQ ID NO: 3408 - DNA, 19 bp, Artificial Sequence
  Description of Artificial Sequence: Synthetic oligonucleotide
cgcatccatgggggtgacc

SEQ ID NO: 3409 - DNA, 19 bp, Artificial Sequence
  Description of Artificial Sequence: Synthetic oligonucleotide
ccgcatccatgggggtgac

SEQ ID NO: 3410 - DNA, 19 bp, Artificial Sequence
  Description of Artificial Sequence: Synthetic oligonucleotide
gccgcatccatgggggtga

SEQ ID NO: 3411 - DNA, 19 bp, Artificial Sequence
  Description of Artificial Sequence: Synthetic oligonucleotide
ggccgcatccatgggggtg

SEQ ID NO: 3412 - DNA, 19 bp, Artificial Sequence
  Description of Artificial Sequence: Synthetic oligonucleotide
tggccgcatccatgggggt

SEQ ID NO: 3413 - DNA, 19 bp, Artificial Sequence
  Description of Artificial Sequence: Synthetic oligonucleotide
gtggccgcatccatggggg

SEQ ID NO: 3414 - DNA, 19 bp, Artificial Sequence
  Description of Artificial Sequence: Synthetic oligonucleotide
tgtggccgcatccatgggg

SEQ ID NO: 3415 - DNA, 19 bp, Artificial Sequence
  Description of Artificial Sequence: Synthetic oligonucleotide
ctgtggccgcatccatggg

SEQ ID NO: 3416 - DNA, 19 bp, Artificial Sequence
  Description of Artificial Sequence: Synthetic oligonucleotide
gctgtggccgcatccatgg

SEQ ID NO: 3417 - DNA, 19 bp, Artificial Sequence
  Description of Artificial Sequence: Synthetic oligonucleotide
ggctgtggccgcatccatg

SEQ ID NO: 3418 - DNA, 19 bp, Artificial Sequence
  Description of Artificial Sequence: Synthetic oligonucleotide
aggctgtggccgcatccat

SEQ ID NO: 3419 - DNA, 19 bp, Artificial Sequence
  Description of Artificial Sequence: Synthetic oligonucleotide
gaggctgtggccgcatcca

SEQ ID NO: 3420 - DNA, 19 bp, Artificial Sequence
  Description of Artificial Sequence: Synthetic oligonucleotide
tgaggctgtggccgcatcc

SEQ ID NO: 3421 - DNA, 19 bp, Artificial Sequence
  Description of Artificial Sequence: Synthetic oligonucleotide
gtgaggctgtggccgcatc

SEQ ID NO: 3422 - DNA, 19 bp, Artificial Sequence
  Description of Artificial Sequence: Synthetic oligonucleotide
agtgaggctgtggccgcat

SEQ ID NO: 3423 - DNA, 19 bp, Artificial Sequence
  Description of Artificial Sequence: Synthetic oligonucleotide
cagtgaggctgtggccgca

SEQ ID NO: 3424 - DNA, 19 bp, Artificial Sequence
  Description of Artificial Sequence: Synthetic oligonucleotide
gcagtgaggctgtggccgc

SEQ ID NO: 3425 - DNA, 18 bp, Artificial Sequence
  Description of Artificial Sequence: Synthetic oligonucleotide
agcagtgaggctgtggcc

SEQ ID NO: 3426 - DNA, 19 bp, Artificial Sequence
  Description of Artificial Sequence: Synthetic oligonucleotide
ataataataattaagagaa

SEQ ID NO: 3427 - DNA, 19 bp, Artificial Sequence
  Description of Artificial Sequence: Synthetic oligonucleotide
tataataataattaagaga

SEQ ID NO: 3428 - DNA, 19 bp, Artificial Sequence
  Description of Artificial Sequence: Synthetic oligonucleotide
atataataataattaagag

SEQ ID NO: 3429 - DNA, 19 bp, Artificial Sequence
  Description of Artificial Sequence: Synthetic oligonucleotide
aatataataataattaaga

SEQ ID NO: 3430 - DNA, 19 bp, Artificial Sequence
  Description of Artificial Sequence: Synthetic oligonucleotide
aaatataataataattaag

SEQ ID NO: 3431 - DNA, 19 bp, Artificial Sequence
  Description of Artificial Sequence: Synthetic oligonucleotide
gaaatataataataattaa

SEQ ID NO: 3432 - DNA, 19 bp, Artificial Sequence
  Description of Artificial Sequence: Synthetic oligonucleotide
agaaatataataataatta

SEQ ID NO: 3433 - DNA, 19 bp, Artificial Sequence
  Description of Artificial Sequence: Synthetic oligonucleotide
cagaaatataataataatt

SEQ ID NO: 3434 - DNA, 19 bp, Artificial Sequence
  Description of Artificial Sequence: Synthetic oligonucleotide
tcagaaatataataataat

SEQ ID NO: 3435 - DNA, 19 bp, Artificial Sequence
  Description of Artificial Sequence: Synthetic oligonucleotide
ctcagaaatataataataa

SEQ ID NO: 3436 - DNA, 19 bp, Artificial Sequence
  Description of Artificial Sequence: Synthetic oligonucleotide
actcagaaatataataata

SEQ ID NO: 3437 - DNA, 19 bp, Artificial Sequence
  Description of Artificial Sequence: Synthetic oligonucleotide
aactcagaaatataataat

SEQ ID NO: 3438 - DNA, 19 bp, Artificial Sequence
  Description of Artificial Sequence: Synthetic oligonucleotide
taactcagaaatataataa

SEQ ID NO: 3439 - DNA, 19 bp, Artificial Sequence
  Description of Artificial Sequence: Synthetic oligonucleotide
ttaactcagaaatataata

SEQ ID NO: 3440 - DNA, 19 bp, Artificial Sequence
  Description of Artificial Sequence: Synthetic oligonucleotide
tttaactcagaaatataat

SEQ ID NO: 3441 - DNA, 19 bp, Artificial Sequence
  Description of Artificial Sequence: Synthetic oligonucleotide
gtttaactcagaaatataa

SEQ ID NO: 3442 - DNA, 19 bp, Artificial Sequence
  Description of Artificial Sequence: Synthetic oligonucleotide
agtttaactcagaaatata

SEQ ID NO: 3443 - DNA, 19 bp, Artificial Sequence
  Description of Artificial Sequence: Synthetic oligonucleotide
aagtttaactcagaaatat

SEQ ID NO: 3444 - DNA, 19 bp, Artificial Sequence
  Description of Artificial Sequence: Synthetic oligonucleotide
taagtttaactcagaaata

SEQ ID NO: 3445 - DNA, 19 bp, Artificial Sequence
  Description of Artificial Sequence: Synthetic oligonucleotide
ctaagtttaactcagaaat

SEQ ID NO: 3446 - DNA, 19 bp, Artificial Sequence
  Description of Artificial Sequence: Synthetic oligonucleotide
tctaagtttaactcagaaa

SEQ ID NO: 3447 - DNA, 19 bp, Artificial Sequence
  Description of Artificial Sequence: Synthetic oligonucleotide
ttctaagtttaactcagaa

SEQ ID NO: 3448 - DNA, 19 bp, Artificial Sequence
  Description of Artificial Sequence: Synthetic oligonucleotide
cttctaagtttaactcaga

SEQ ID NO: 3449 - DNA, 19 bp, Artificial Sequence
  Description of Artificial Sequence: Synthetic oligonucleotide
tcttctaagtttaactcag

SEQ ID NO: 3450 - DNA, 19 bp, Artificial Sequence
  Description of Artificial Sequence: Synthetic oligonucleotide
ttcttctaagtttaactca

SEQ ID NO: 3451 - DNA, 19 bp, Artificial Sequence
  Description of Artificial Sequence: Synthetic oligonucleotide
tttcttctaagtttaactc

SEQ ID NO: 3452 - DNA, 19 bp, Artificial Sequence
  Description of Artificial Sequence: Synthetic oligonucleotide
gtttcttctaagtttaact

SEQ ID NO: 3453 - DNA, 19 bp, Artificial Sequence
  Description of Artificial Sequence: Synthetic oligonucleotide
tgtttcttctaagtttaac

SEQ ID NO: 3454 - DNA, 19 bp, Artificial Sequence
  Description of Artificial Sequence: Synthetic oligonucleotide
ttgtttcttctaagtttaa

SEQ ID NO: 3455 - DNA, 19 bp, Artificial Sequence
  Description of Artificial Sequence: Synthetic oligonucleotide
gttgtttcttctaagttta

SEQ ID NO: 3456 - DNA, 19 bp, Artificial Sequence
  Description of Artificial Sequence: Synthetic oligonucleotide
agttgtttcttctaagttt

SEQ ID NO: 3457 - DNA, 19 bp, Artificial Sequence
  Description of Artificial Sequence: Synthetic oligonucleotide
tagttgtttcttctaagtt

SEQ ID NO: 3458 - DNA, 19 bp, Artificial Sequence
  Description of Artificial Sequence: Synthetic oligonucleotide
atagttgtttcttctaagt

SEQ ID NO: 3459 - DNA, 19 bp, Artificial Sequence
  Description of Artificial Sequence: Synthetic oligonucleotide
gatagttgtttcttctaag

SEQ ID NO: 3460 - DNA, 19 bp, Artificial Sequence
  Description of Artificial Sequence: Synthetic oligonucleotide
tgatagttgtttcttctaa

SEQ ID NO: 3461 - DNA, 19 bp, Artificial Sequence
  Description of Artificial Sequence: Synthetic oligonucleotide
ttgatagttgtttcttcta

SEQ ID NO: 3462 - DNA, 19 bp, Artificial Sequence
  Description of Artificial Sequence: Synthetic oligonucleotide
cttgatagttgtttcttct

SEQ ID NO: 3463 - DNA, 19 bp, Artificial Sequence
  Description of Artificial Sequence: Synthetic oligonucleotide
gcttgatagttgtttcttc

SEQ ID NO: 3464 - DNA, 19 bp, Artificial Sequence
  Description of Artificial Sequence: Synthetic oligonucleotide
agcttgatagttgtttctt

SEQ ID NO: 3465 - DNA, 19 bp, Artificial Sequence
  Description of Artificial Sequence: Synthetic oligonucleotide
tagcttgatagttgtttct

SEQ ID NO: 3466 - DNA, 19 bp, Artificial Sequence
  Description of Artificial Sequence: Synthetic oligonucleotide
gtagcttgatagttgtttc

SEQ ID NO: 3467 - DNA, 19 bp, Artificial Sequence
  Description of Artificial Sequence: Synthetic oligonucleotide
tgtagcttgatagttgttt

SEQ ID NO: 3468 - DNA, 19 bp, Artificial Sequence
  Description of Artificial Sequence: Synthetic oligonucleotide
ttgtagcttgatagttgtt

SEQ ID NO: 3469 - DNA, 19 bp, Artificial Sequence
  Description of Artificial Sequence: Synthetic oligonucleotide
gttgtagcttgatagttgt

SEQ ID NO: 3470 - DNA, 19 bp, Artificial Sequence
  Description of Artificial Sequence: Synthetic oligonucleotide
agttgtagcttgatagttg

SEQ ID NO: 3471 - DNA, 19 bp, Artificial Sequence
  Description of Artificial Sequence: Synthetic oligonucleotide
aagttgtagcttgatagtt

SEQ ID NO: 3472 - DNA, 19 bp, Artificial Sequence
  Description of Artificial Sequence: Synthetic oligonucleotide
aaagttgtagcttgatagt

SEQ ID NO: 3473 - DNA, 19 bp, Artificial Sequence
  Description of Artificial Sequence: Synthetic oligonucleotide
aaaagttgtagcttgatag

SEQ ID NO: 3474 - DNA, 19 bp, Artificial Sequence
  Description of Artificial Sequence: Synthetic oligonucleotide
gaaaagttgtagcttgata

SEQ ID NO: 3475 - DNA, 19 bp, Artificial Sequence
  Description of Artificial Sequence: Synthetic oligonucleotide
ggaaaagttgtagcttgat

SEQ ID NO: 3476 - DNA, 19 bp, Artificial Sequence
  Description of Artificial Sequence: Synthetic oligonucleotide
aggaaaagttgtagcttga

SEQ ID NO: 3477 - DNA, 19 bp, Artificial Sequence
  Description of Artificial Sequence: Synthetic oligonucleotide
caggaaaagttgtagcttg

SEQ ID NO: 3478 - DNA, 19 bp, Artificial Sequence
  Description of Artificial Sequence: Synthetic oligonucleotide
gcaggaaaagttgtagctt

SEQ ID NO: 3479 - DNA, 19 bp, Artificial Sequence
  Description of Artificial Sequence: Synthetic oligonucleotide
ggcaggaaaagttgtagct

SEQ ID NO: 3480 - DNA, 19 bp, Artificial Sequence
  Description of Artificial Sequence: Synthetic oligonucleotide
tggcaggaaaagttgtagc

SEQ ID NO: 3481 - DNA, 19 bp, Artificial Sequence
  Description of Artificial Sequence: Synthetic oligonucleotide
atggcaggaaaagttgtag

SEQ ID NO: 3482 - DNA, 19 bp, Artificial Sequence
  Description of Artificial Sequence: Synthetic oligonucleotide
aatggcaggaaaagttgta

SEQ ID NO: 3483 - DNA, 19 bp, Artificial Sequence
  Description of Artificial Sequence: Synthetic oligonucleotide
aaatggcaggaaaagttgt

SEQ ID NO: 3484 - DNA, 19 bp, Artificial Sequence
  Description of Artificial Sequence: Synthetic oligonucleotide
aaaatggcaggaaaagttg

SEQ ID NO: 3485 - DNA, 19 bp, Artificial Sequence
  Description of Artificial Sequence: Synthetic oligonucleotide
gaaaatggcaggaaaagtt

SEQ ID NO: 3486 - DNA, 19 bp, Artificial Sequence
  Description of Artificial Sequence: Synthetic oligonucleotide
ggaaaatggcaggaaaagt

SEQ ID NO: 3487 - DNA, 19 bp, Artificial Sequence
  Description of Artificial Sequence: Synthetic oligonucleotide
aggaaaatggcaggaaaag

SEQ ID NO: 3488 - DNA, 19 bp, Artificial Sequence
  Description of Artificial Sequence: Synthetic oligonucleotide
caggaaaatggcaggaaaa

SEQ ID NO: 3489 - DNA, 19 bp, Artificial Sequence
  Description of Artificial Sequence: Synthetic oligonucleotide
acaggaaaatggcaggaaa

SEQ ID NO: 3490 - DNA, 19 bp, Artificial Sequence
  Description of Artificial Sequence: Synthetic oligonucleotide
cacaggaaaatggcaggaa

SEQ ID NO: 3491 - DNA, 19 bp, Artificial Sequence
  Description of Artificial Sequence: Synthetic oligonucleotide
ccacaggaaaatggcagga

SEQ ID NO: 3492 - DNA, 19 bp, Artificial Sequence
  Description of Artificial Sequence: Synthetic oligonucleotide
accacaggaaaatggcagg

SEQ ID NO: 3493 - DNA, 19 bp, Artificial Sequence
  Description of Artificial Sequence: Synthetic oligonucleotide
aaccacaggaaaatggcag

SEQ ID NO: 3494 - DNA, 19 bp, Artificial Sequence
  Description of Artificial Sequence: Synthetic oligonucleotide
caaccacaggaaaatggca

SEQ ID NO: 3495 - DNA, 19 bp, Artificial Sequence
  Description of Artificial Sequence: Synthetic oligonucleotide
gcaaccacaggaaaatggc

SEQ ID NO: 3496 - DNA, 19 bp, Artificial Sequence
  Description of Artificial Sequence: Synthetic oligonucleotide
tgcaaccacaggaaaatgg

SEQ ID NO: 3497 - DNA, 19 bp, Artificial Sequence
  Description of Artificial Sequence: Synthetic oligonucleotide
ctgcaaccacaggaaaatg

SEQ ID NO: 3498 - DNA, 19 bp, Artificial Sequence
  Description of Artificial Sequence: Synthetic oligonucleotide
gctgcaaccacaggaaaat

SEQ ID NO: 3499 - DNA, 19 bp, Artificial Sequence
  Description of Artificial Sequence: Synthetic oligonucleotide
ggctgcaaccacaggaaaa

SEQ ID NO: 3500 - DNA, 19 bp, Artificial Sequence
  Description of Artificial Sequence: Synthetic oligonucleotide
aggctgcaaccacaggaaa

SEQ ID NO: 3501 - DNA, 19 bp, Artificial Sequence
  Description of Artificial Sequence: Synthetic oligonucleotide
caggctgcaaccacaggaa

SEQ ID NO: 3502 - DNA, 19 bp, Artificial Sequence
  Description of Artificial Sequence: Synthetic oligonucleotide
acaggctgcaaccacagga

SEQ ID NO: 3503 - DNA, 19 bp, Artificial Sequence
  Description of Artificial Sequence: Synthetic oligonucleotide
gacaggctgcaaccacagg

SEQ ID NO: 3504 - DNA, 19 bp, Artificial Sequence
  Description of Artificial Sequence: Synthetic oligonucleotide
agacaggctgcaaccacag

SEQ ID NO: 3505 - DNA, 19 bp, Artificial Sequence
  Description of Artificial Sequence: Synthetic oligonucleotide
aagacaggctgcaaccaca

SEQ ID NO: 3506 - DNA, 19 bp, Artificial Sequence
  Description of Artificial Sequence: Synthetic oligonucleotide
gaagacaggctgcaaccac

SEQ ID NO: 3507 - DNA, 19 bp, Artificial Sequence
  Description of Artificial Sequence: Synthetic oligonucleotide
ggaagacaggctgcaacca

SEQ ID NO: 3508 - DNA, 19 bp, Artificial Sequence
  Description of Artificial Sequence: Synthetic oligonucleotide
aggaagacaggctgcaacc

SEQ ID NO: 3509 - DNA, 19 bp, Artificial Sequence
  Description of Artificial Sequence: Synthetic oligonucleotide
aaggaagacaggctgcaac

SEQ ID NO: 3510 - DNA, 19 bp, Artificial Sequence
  Description of Artificial Sequence: Synthetic oligonucleotide
aaaggaagacaggctgcaa

SEQ ID NO: 3511 - DNA, 19 bp, Artificial Sequence
  Description of Artificial Sequence: Synthetic oligonucleotide
caaaggaagacaggctgca

SEQ ID NO: 3512 - DNA, 19 bp, Artificial Sequence
  Description of Artificial Sequence: Synthetic oligonucleotide
tcaaaggaagacaggctgc

SEQ ID NO: 3513 - DNA, 19 bp, Artificial Sequence
  Description of Artificial Sequence: Synthetic oligonucleotide
ttcaaaggaagacaggctg

SEQ ID NO: 3514 - DNA, 19 bp, Artificial Sequence
  Description of Artificial Sequence: Synthetic oligonucleotide
tttcaaaggaagacaggct

SEQ ID NO: 3515 - DNA, 19 bp, Artificial Sequence
  Description of Artificial Sequence: Synthetic oligonucleotide
atttcaaaggaagacaggc

SEQ ID NO: 3516 - DNA, 19 bp, Artificial Sequence
  Description of Artificial Sequence: Synthetic oligonucleotide
aatttcaaaggaagacagg

SEQ ID NO: 3517 - DNA, 19 bp, Artificial Sequence
  Description of Artificial Sequence: Synthetic oligonucleotide
caatttcaaaggaagacag

SEQ ID NO: 3518 - DNA, 19 bp, Artificial Sequence
  Description of Artificial Sequence: Synthetic oligonucleotide
acaatttcaaaggaagaca

SEQ ID NO: 3519 - DNA, 19 bp, Artificial Sequence
  Description of Artificial Sequence: Synthetic oligonucleotide
aacaatttcaaaggaagac

SEQ ID NO: 3520 - DNA, 19 bp, Artificial Sequence
  Description of Artificial Sequence: Synthetic oligonucleotide
aaacaatttcaaaggaaga

SEQ ID NO: 3521 - DNA, 19 bp, Artificial Sequence
  Description of Artificial Sequence: Synthetic oligonucleotide
aaaacaatttcaaaggaag

SEQ ID NO: 3522 - DNA, 19 bp, Artificial Sequence
  Description of Artificial Sequence: Synthetic oligonucleotide
taaaacaatttcaaaggaa

SEQ ID NO: 3523 - DNA, 19 bp, Artificial Sequence
  Description of Artificial Sequence: Synthetic oligonucleotide
gtaaaacaatttcaaagga

SEQ ID NO: 3524 - DNA, 19 bp, Artificial Sequence
  Description of Artificial Sequence: Synthetic oligonucleotide
agtaaaacaatttcaaagg

SEQ ID NO: 3525 - DNA, 19 bp, Artificial Sequence
  Description of Artificial Sequence: Synthetic oligonucleotide
gagtaaaacaatttcaaag

SEQ ID NO: 3526 - DNA, 19 bp, Artificial Sequence
  Description of Artificial Sequence: Synthetic oligonucleotide
agagtaaaacaatttcaaa

SEQ ID NO: 3527 - DNA, 19 bp, Artificial Sequence
  Description of Artificial Sequence: Synthetic oligonucleotide
gagagtaaaacaatttcaa

SEQ ID NO: 3528 - DNA, 19 bp, Artificial Sequence
  Description of Artificial Sequence: Synthetic oligonucleotide
agagagtaaaacaatttca

SEQ ID NO: 3529 - DNA, 19 bp, Artificial Sequence
  Description of Artificial Sequence: Synthetic oligonucleotide
cagagagtaaaacaatttc

SEQ ID NO: 3530 - DNA, 19 bp, Artificial Sequence
  Description of Artificial Sequence: Synthetic oligonucleotide
tcagagagtaaaacaattt

SEQ ID NO: 3531 - DNA, 19 bp, Artificial Sequence
  Description of Artificial Sequence: Synthetic oligonucleotide
ctcagagagtaaaacaatt

SEQ ID NO: 3532 - DNA, 19 bp, Artificial Sequence
  Description of Artificial Sequence: Synthetic oligonucleotide
actcagagagtaaaacaat

SEQ ID NO: 3533 - DNA, 19 bp, Artificial Sequence
  Description of Artificial Sequence: Synthetic oligonucleotide
aactcagagagtaaaacaa

SEQ ID NO: 3534 - DNA, 19 bp, Artificial Sequence
  Description of Artificial Sequence: Synthetic oligonucleotide
aaactcagagagtaaaaca

SEQ ID NO: 3535 - DNA, 19 bp, Artificial Sequence
  Description of Artificial Sequence: Synthetic oligonucleotide
aaaactcagagagtaaaac

SEQ ID NO: 3536 - DNA, 19 bp, Artificial Sequence
  Description of Artificial Sequence: Synthetic oligonucleotide
taaaactcagagagtaaaa

SEQ ID NO: 3537 - DNA, 19 bp, Artificial Sequence
  Description of Artificial Sequence: Synthetic oligonucleotide
ataaaactcagagagtaaa

SEQ ID NO: 3538 - DNA, 19 bp, Artificial Sequence
  Description of Artificial Sequence: Synthetic oligonucleotide
tataaaactcagagagtaa

SEQ ID NO: 3539 - DNA, 19 bp, Artificial Sequence
  Description of Artificial Sequence: Synthetic oligonucleotide
atataaaactcagagagta

SEQ ID NO: 3540 - DNA, 19 bp, Artificial Sequence
  Description of Artificial Sequence: Synthetic oligonucleotide
catataaaactcagagagt

SEQ ID NO: 3541 - DNA, 19 bp, Artificial Sequence
  Description of Artificial Sequence: Synthetic oligonucleotide
gcatataaaactcagagag

SEQ ID NO: 3542 - DNA, 19 bp, Artificial Sequence
  Description of Artificial Sequence: Synthetic oligonucleotide
agcatataaaactcagaga

SEQ ID NO: 3543 - DNA, 19 bp, Artificial Sequence
  Description of Artificial Sequence: Synthetic oligonucleotide
cagcatataaaactcagag

SEQ ID NO: 3544 - DNA, 19 bp, Artificial Sequence
  Description of Artificial Sequence: Synthetic oligonucleotide
ccagcatataaaactcaga

SEQ ID NO: 3545 - DNA, 19 bp, Artificial Sequence
  Description of Artificial Sequence: Synthetic oligonucleotide
tccagcatataaaactcag

SEQ ID NO: 3546 - DNA, 19 bp, Artificial Sequence
  Description of Artificial Sequence: Synthetic oligonucleotide
ttccagcatataaaactca

SEQ ID NO: 3547 - DNA, 19 bp, Artificial Sequence
  Description of Artificial Sequence: Synthetic oligonucleotide
attccagcatataaaactc

SEQ ID NO: 3548 - DNA, 19 bp, Artificial Sequence
  Description of Artificial Sequence: Synthetic oligonucleotide
gattccagcatataaaact

SEQ ID NO: 3549 - DNA, 19 bp, Artificial Sequence
  Description of Artificial Sequence: Synthetic oligonucleotide
ggattccagcatataaaac

SEQ ID NO: 3550 - DNA, 19 bp, Artificial Sequence
  Description of Artificial Sequence: Synthetic oligonucleotide
tggattccagcatataaaa

SEQ ID NO: 3551 - DNA, 19 bp, Artificial Sequence
  Description of Artificial Sequence: Synthetic oligonucleotide
ttggattccagcatataaa

SEQ ID NO: 3552 - DNA, 19 bp, Artificial Sequence
  Description of Artificial Sequence: Synthetic oligonucleotide
attggattccagcatataa

SEQ ID NO: 3553 - DNA, 19 bp, Artificial Sequence
  Description of Artificial Sequence: Synthetic oligonucleotide
cattggattccagcatata

SEQ ID NO: 3554 - DNA, 19 bp, Artificial Sequence
  Description of Artificial Sequence: Synthetic oligonucleotide
gcattggattccagcatat

SEQ ID NO: 3555 - DNA, 19 bp, Artificial Sequence
  Description of Artificial Sequence: Synthetic oligonucleotide
tgcattggattccagcata

SEQ ID NO: 3556 - DNA, 19 bp, Artificial Sequence
  Description of Artificial Sequence: Synthetic oligonucleotide
ctgcattggattccagcat

SEQ ID NO: 3557 - DNA, 19 bp, Artificial Sequence
  Description of Artificial Sequence: Synthetic oligonucleotide
tctgcattggattccagca

SEQ ID NO: 3558 - DNA, 19 bp, Artificial Sequence
  Description of Artificial Sequence: Synthetic oligonucleotide
ctctgcattggattccagc

SEQ ID NO: 3559 - DNA, 19 bp, Artificial Sequence
  Description of Artificial Sequence: Synthetic oligonucleotide
actctgcattggattccag

SEQ ID NO: 3560 - DNA, 19 bp, Artificial Sequence
  Description of Artificial Sequence: Synthetic oligonucleotide
aactctgcattggattcca

SEQ ID NO: 3561 - DNA, 19 bp, Artificial Sequence
  Description of Artificial Sequence: Synthetic oligonucleotide
caactctgcattggattcc

SEQ ID NO: 3562 - DNA, 19 bp, Artificial Sequence
  Description of Artificial Sequence: Synthetic oligonucleotide
ccaactctgcattggattc

SEQ ID NO: 3563 - DNA, 19 bp, Artificial Sequence
  Description of Artificial Sequence: Synthetic oligonucleotide
accaactctgcattggatt

SEQ ID NO: 3564 - DNA, 19 bp, Artificial Sequence
  Description of Artificial Sequence: Synthetic oligonucleotide
aaccaactctgcattggat

SEQ ID NO: 3565 - DNA, 19 bp, Artificial Sequence
  Description of Artificial Sequence: Synthetic oligonucleotide
aaaccaactctgcattgga

SEQ ID NO: 3566 - DNA, 19 bp, Artificial Sequence
  Description of Artificial Sequence: Synthetic oligonucleotide
caaaccaactctgcattgg

SEQ ID NO: 3567 - DNA, 19 bp, Artificial Sequence
  Description of Artificial Sequence: Synthetic oligonucleotide
ccaaaccaactctgcattg

SEQ ID NO: 3568 - DNA, 19 bp, Artificial Sequence
  Description of Artificial Sequence: Synthetic oligonucleotide
cccaaaccaactctgcatt

SEQ ID NO: 3569 - DNA, 19 bp, Artificial Sequence
  Description of Artificial Sequence: Synthetic oligonucleotide
tcccaaaccaactctgcat

SEQ ID NO: 3570 - DNA, 19 bp, Artificial Sequence
  Description of Artificial Sequence: Synthetic oligonucleotide
gtcccaaaccaactctgca

SEQ ID NO: 3571 - DNA, 19 bp, Artificial Sequence
  Description of Artificial Sequence: Synthetic oligonucleotide
agtcccaaaccaactctgc

SEQ ID NO: 3572 - DNA, 19 bp, Artificial Sequence
  Description of Artificial Sequence: Synthetic oligonucleotide
cagtcccaaaccaactctg

SEQ ID NO: 3573 - DNA, 19 bp, Artificial Sequence
  Description of Artificial Sequence: Synthetic oligonucleotide
acagtcccaaaccaactct

SEQ ID NO: 3574 - DNA, 19 bp, Artificial Sequence
  Description of Artificial Sequence: Synthetic oligonucleotide
cacagtcccaaaccaactc

SEQ ID NO: 3575 - DNA, 19 bp, Artificial Sequence
  Description of Artificial Sequence: Synthetic oligonucleotide
tcacagtcccaaaccaact

SEQ ID NO: 3576 - DNA, 19 bp, Artificial Sequence
  Description of Artificial Sequence: Synthetic oligonucleotide
atcacagtcccaaaccaac

SEQ ID NO: 3577 - DNA, 19 bp, Artificial Sequence
  Description of Artificial Sequence: Synthetic oligonucleotide
gatcacagtcccaaaccaa

SEQ ID NO: 3578 - DNA, 19 bp, Artificial Sequence
  Description of Artificial Sequence: Synthetic oligonucleotide
tgatcacagtcccaaacca

SEQ ID NO: 3579 - DNA, 19 bp, Artificial Sequence
  Description of Artificial Sequence: Synthetic oligonucleotide
ttgatcacagtcccaaacc

SEQ ID NO: 3580 - DNA, 19 bp, Artificial Sequence
  Description of Artificial Sequence: Synthetic oligonucleotide
cttgatcacagtcccaaac

SEQ ID NO: 3581 - DNA, 19 bp, Artificial Sequence
  Description of Artificial Sequence: Synthetic oligonucleotide
tcttgatcacagtcccaaa

SEQ ID NO: 3582 - DNA, 19 bp, Artificial Sequence
  Description of Artificial Sequence: Synthetic oligonucleotide
gtcttgatcacagtcccaa

SEQ ID NO: 3583 - DNA, 19 bp, Artificial Sequence
  Description of Artificial Sequence: Synthetic oligonucleotide
tgtcttgatcacagtccca

SEQ ID NO: 3584 - DNA, 19 bp, Artificial Sequence
  Description of Artificial Sequence: Synthetic oligonucleotide
gtgtcttgatcacagtccc

SEQ ID NO: 3585 - DNA, 19 bp, Artificial Sequence
  Description of Artificial Sequence: Synthetic oligonucleotide
ggtgtcttgatcacagtcc

SEQ ID NO: 3586 - DNA, 19 bp, Artificial Sequence
  Description of Artificial Sequence: Synthetic oligonucleotide
aggtgtcttgatcacagtc

SEQ ID NO: 3587 - DNA, 19 bp, Artificial Sequence
  Description of Artificial Sequence: Synthetic oligonucleotide
aaggtgtcttgatcacagt

SEQ ID NO: 3588 - DNA, 19 bp, Artificial Sequence
  Description of Artificial Sequence: Synthetic oligonucleotide
aaaggtgtcttgatcacag

SEQ ID NO: 3589 - DNA, 19 bp, Artificial Sequence
  Description of Artificial Sequence: Synthetic oligonucleotide
aaaaggtgtcttgatcaca

SEQ ID NO: 3590 - DNA, 19 bp, Artificial Sequence
  Description of Artificial Sequence: Synthetic oligonucleotide
taaaaggtgtcttgatcac

SEQ ID NO: 3591 - DNA, 19 bp, Artificial Sequence
  Description of Artificial Sequence: Synthetic oligonucleotide
ataaaaggtgtcttgatca

SEQ ID NO: 3592 - DNA, 19 bp, Artificial Sequence
  Description of Artificial Sequence: Synthetic oligonucleotide
aataaaaggtgtcttgatc

SEQ ID NO: 3593 - DNA, 19 bp, Artificial Sequence
  Description of Artificial Sequence: Synthetic oligonucleotide
taataaaaggtgtcttgat

SEQ ID NO: 3594 - DNA, 19 bp, Artificial Sequence
  Description of Artificial Sequence: Synthetic oligonucleotide
ttaataaaaggtgtcttga

SEQ ID NO: 3595 - DNA, 19 bp, Artificial Sequence
  Description of Artificial Sequence: Synthetic oligonucleotide
attaataaaaggtgtcttg

SEQ ID NO: 3596 - DNA, 19 bp, Artificial Sequence
  Description of Artificial Sequence: Synthetic oligonucleotide
tattaataaaaggtgtctt

SEQ ID NO: 3597 - DNA, 19 bp, Artificial Sequence
  Description of Artificial Sequence: Synthetic oligonucleotide
ttattaataaaaggtgtct

SEQ ID NO: 3598 - DNA, 19 bp, Artificial Sequence
  Description of Artificial Sequence: Synthetic oligonucleotide
tttattaataaaaggtgtc

SEQ ID NO: 3599 - DNA, 19 bp, Artificial Sequence
  Description of Artificial Sequence: Synthetic oligonucleotide
ctttattaataaaaggtgt

SEQ ID NO: 3600 - DNA, 19 bp, Artificial Sequence
  Description of Artificial Sequence: Synthetic oligonucleotide
tctttattaataaaaggtg

SEQ ID NO: 3601 - DNA, 19 bp, Artificial Sequence
  Description of Artificial Sequence: Synthetic oligonucleotide
ttctttattaataaaaggt

SEQ ID NO: 3602 - DNA, 19 bp, Artificial Sequence
  Description of Artificial Sequence: Synthetic oligonucleotide
cttctttattaataaaagg

SEQ ID NO: 3603 - DNA, 19 bp, Artificial Sequence
  Description of Artificial Sequence: Synthetic oligonucleotide
tcttctttattaataaaag

SEQ ID NO: 3604 - DNA, 19 bp, Artificial Sequence
  Description of Artificial Sequence: Synthetic oligonucleotide
ctcttctttattaataaaa

SEQ ID NO: 3605 - DNA, 19 bp, Artificial Sequence
  Description of Artificial Sequence: Synthetic oligonucleotide
tctcttctttattaataaa

SEQ ID NO: 3606 - DNA, 19 bp, Artificial Sequence
  Description of Artificial Sequence: Synthetic oligonucleotide
gtctcttctttattaataa

SEQ ID NO: 3607 - DNA, 19 bp, Artificial Sequence
  Description of Artificial Sequence: Synthetic oligonucleotide
tgtctcttctttattaata

SEQ ID NO: 3608 - DNA, 19 bp, Artificial Sequence
  Description of Artificial Sequence: Synthetic oligonucleotide
gtgtctcttctttattaat

SEQ ID NO: 3609 - DNA, 19 bp, Artificial Sequence
  Description of Artificial Sequence: Synthetic oligonucleotide
tgtgtctcttctttattaa

SEQ ID NO: 3610 - DNA, 19 bp, Artificial Sequence
  Description of Artificial Sequence: Synthetic oligonucleotide
ctgtgtctcttctttatta

SEQ ID NO: 3611 - DNA, 19 bp, Artificial Sequence
  Description of Artificial Sequence: Synthetic oligonucleotide
cctgtgtctcttctttatt

SEQ ID NO: 3612 - DNA, 19 bp, Artificial Sequence
  Description of Artificial Sequence: Synthetic oligonucleotide
acctgtgtctcttctttat

SEQ ID NO: 3613 - DNA, 19 bp, Artificial Sequence
  Description of Artificial Sequence: Synthetic oligonucleotide
cacctgtgtctcttcttta

SEQ ID NO: 3614 - DNA, 19 bp, Artificial Sequence
  Description of Artificial Sequence: Synthetic oligonucleotide
acacctgtgtctcttcttt

SEQ ID NO: 3615 - DNA, 19 bp, Artificial Sequence
  Description of Artificial Sequence: Synthetic oligonucleotide
tacacctgtgtctcttctt

SEQ ID NO: 3616 - DNA, 19 bp, Artificial Sequence
  Description of Artificial Sequence: Synthetic oligonucleotide
ctacacctgtgtctcttct

SEQ ID NO: 3617 - DNA, 19 bp, Artificial Sequence
  Description of Artificial Sequence: Synthetic oligonucleotide
tctacacctgtgtctcttc

SEQ ID NO: 3618 - DNA, 19 bp, Artificial Sequence
  Description of Artificial Sequence: Synthetic oligonucleotide
atctacacctgtgtctctt

SEQ ID NO: 3619 - DNA, 19 bp, Artificial Sequence
  Description of Artificial Sequence: Synthetic oligonucleotide
tatctacacctgtgtctct

SEQ ID NO: 3620 - DNA, 19 bp, Artificial Sequence
  Description of Artificial Sequence: Synthetic oligonucleotide
atatctacacctgtgtctc

SEQ ID NO: 3621 - DNA, 19 bp, Artificial Sequence
  Description of Artificial Sequence: Synthetic oligonucleotide
catatctacacctgtgtct

SEQ ID NO: 3622 - DNA, 19 bp, Artificial Sequence
  Description of Artificial Sequence: Synthetic oligonucleotide
acatatctacacctgtgtc

SEQ ID NO: 3623 - DNA, 19 bp, Artificial Sequence
  Description of Artificial Sequence: Synthetic oligonucleotide
tacatatctacacctgtgt

SEQ ID NO: 3624 - DNA, 19 bp, Artificial Sequence
  Description of Artificial Sequence: Synthetic oligonucleotide
atacatatctacacctgtg

SEQ ID NO: 3625 - DNA, 19 bp, Artificial Sequence
  Description of Artificial Sequence: Synthetic oligonucleotide
tatacatatctacacctgt

SEQ ID NO: 3626 - DNA, 19 bp, Artificial Sequence
  Description of Artificial Sequence: Synthetic oligonucleotide
atatacatatctacacctg

SEQ ID NO: 3627 - DNA, 19 bp, Artificial Sequence
  Description of Artificial Sequence: Synthetic oligonucleotide
tatatacatatctacacct

SEQ ID NO: 3628 - DNA, 19 bp, Artificial Sequence
  Description of Artificial Sequence: Synthetic oligonucleotide
gtatatacatatctacacc

SEQ ID NO: 3629 - DNA, 19 bp, Artificial Sequence
  Description of Artificial Sequence: Synthetic oligonucleotide
tgtatatacatatctacac

SEQ ID NO: 3630 - DNA, 19 bp, Artificial Sequence
  Description of Artificial Sequence: Synthetic oligonucleotide
ttgtatatacatatctaca

SEQ ID NO: 3631 - DNA, 19 bp, Artificial Sequence
  Description of Artificial Sequence: Synthetic oligonucleotide
tttgtatatacatatctac

SEQ ID NO: 3632 - DNA, 19 bp, Artificial Sequence
  Description of Artificial Sequence: Synthetic oligonucleotide
ttttgtatatacatatcta

SEQ ID NO: 3633 - DNA, 19 bp, Artificial Sequence
  Description of Artificial Sequence: Synthetic oligonucleotide
tttttgtatatacatatct

SEQ ID NO: 3634 - DNA, 19 bp, Artificial Sequence
  Description of Artificial Sequence: Synthetic oligonucleotide
ctttttgtatatacatatc

SEQ ID NO: 3635 - DNA, 19 bp, Artificial Sequence
  Description of Artificial Sequence: Synthetic oligonucleotide
tctttttgtatatacatat

SEQ ID NO: 3636 - DNA, 19 bp, Artificial Sequence
  Description of Artificial Sequence: Synthetic oligonucleotide
atctttttgtatatacata

SEQ ID NO: 3637 - DNA, 19 bp, Artificial Sequence
  Description of Artificial Sequence: Synthetic oligonucleotide
catctttttgtatatacat

SEQ ID NO: 3638 - DNA, 19 bp, Artificial Sequence
  Description of Artificial Sequence: Synthetic oligonucleotide
acatctttttgtatataca

SEQ ID NO: 3639 - DNA, 19 bp, Artificial Sequence
  Description of Artificial Sequence: Synthetic oligonucleotide
tacatctttttgtatatac

SEQ ID NO: 3640 - DNA, 19 bp, Artificial Sequence
  Description of Artificial Sequence: Synthetic oligonucleotide
gtacatctttttgtatata

SEQ ID NO: 3641 - DNA, 19 bp, Artificial Sequence
  Description of Artificial Sequence: Synthetic oligonucleotide
cgtacatctttttgtatat

SEQ ID NO: 3642 - DNA, 19 bp, Artificial Sequence
  Description of Artificial Sequence: Synthetic oligonucleotide
ccgtacatctttttgtata

SEQ ID NO: 3643 - DNA, 19 bp, Artificial Sequence
  Description of Artificial Sequence: Synthetic oligonucleotide
accgtacatctttttgtat

SEQ ID NO: 3644 - DNA, 19 bp, Artificial Sequence
  Description of Artificial Sequence: Synthetic oligonucleotide
gaccgtacatctttttgta

SEQ ID NO: 3645 - DNA, 19 bp, Artificial Sequence
  Description of Artificial Sequence: Synthetic oligonucleotide
agaccgtacatctttttgt

SEQ ID NO: 3646 - DNA, 19 bp, Artificial Sequence
  Description of Artificial Sequence: Synthetic oligonucleotide
cagaccgtacatctttttg

SEQ ID NO: 3647 - DNA, 19 bp, Artificial Sequence
  Description of Artificial Sequence: Synthetic oligonucleotide
ccagaccgtacatcttttt

SEQ ID NO: 3648 - DNA, 19 bp, Artificial Sequence
  Description of Artificial Sequence: Synthetic oligonucleotide
gccagaccgtacatctttt

SEQ ID NO: 3649 - DNA, 19 bp, Artificial Sequence
  Description of Artificial Sequence: Synthetic oligonucleotide
ggccagaccgtacatcttt

SEQ ID NO: 3650 - DNA, 19 bp, Artificial Sequence
  Description of Artificial Sequence: Synthetic oligonucleotide
tggccagaccgtacatctt

SEQ ID NO: 3651 - DNA, 19 bp, Artificial Sequence
  Description of Artificial Sequence: Synthetic oligonucleotide
ttggccagaccgtacatct

SEQ ID NO: 3652 - DNA, 19 bp, Artificial Sequence
  Description of Artificial Sequence: Synthetic oligonucleotide
tttggccagaccgtacatc

SEQ ID NO: 3653 - DNA, 19 bp, Artificial Sequence
  Description of Artificial Sequence: Synthetic oligonucleotide
gtttggccagaccgtacat

SEQ ID NO: 3654 - DNA, 19 bp, Artificial Sequence
  Description of Artificial Sequence: Synthetic oligonucleotide
ggtttggccagaccgtaca

SEQ ID NO: 3655 - DNA, 19 bp, Artificial Sequence
  Description of Artificial Sequence: Synthetic oligonucleotide
tggtttggccagaccgtac

SEQ ID NO: 3656 - DNA, 19 bp, Artificial Sequence
  Description of Artificial Sequence: Synthetic oligonucleotide
gtggtttggccagaccgta

SEQ ID NO: 3657 - DNA, 19 bp, Artificial Sequence
  Description of Artificial Sequence: Synthetic oligonucleotide
ggtggtttggccagaccgt

SEQ ID NO: 3658 - DNA, 19 bp, Artificial Sequence
  Description of Artificial Sequence: Synthetic oligonucleotide
aggtggtttggccagaccg

SEQ ID NO: 3659 - DNA, 19 bp, Artificial Sequence
  Description of Artificial Sequence: Synthetic oligonucleotide
aaggtggtttggccagacc

SEQ ID NO: 3660 - DNA, 19 bp, Artificial Sequence
  Description of Artificial Sequence: Synthetic oligonucleotide
gaaggtggtttggccagac

SEQ ID NO: 3661 - DNA, 19 bp, Artificial Sequence
  Description of Artificial Sequence: Synthetic oligonucleotide
ggaaggtggtttggccaga

SEQ ID NO: 3662 - DNA, 19 bp, Artificial Sequence
  Description of Artificial Sequence: Synthetic oligonucleotide
gggaaggtggtttggccag

SEQ ID NO: 3663 - DNA, 19 bp, Artificial Sequence
  Description of Artificial Sequence: Synthetic oligonucleotide
tgggaaggtggtttggcca

SEQ ID NO: 3664 - DNA, 19 bp, Artificial Sequence
  Description of Artificial Sequence: Synthetic oligonucleotide
ctgggaaggtggtttggcc

SEQ ID NO: 3665 - DNA, 19 bp, Artificial Sequence
  Description of Artificial Sequence: Synthetic oligonucleotide
gctgggaaggtggtttggc

SEQ ID NO: 3666 - DNA, 19 bp, Artificial Sequence
  Description of Artificial Sequence: Synthetic oligonucleotide
ggctgggaaggtggtttgg

SEQ ID NO: 3667 - DNA, 19 bp, Artificial Sequence
  Description of Artificial Sequence: Synthetic oligonucleotide
aggctgggaaggtggtttg

SEQ ID NO: 3668 - DNA, 19 bp, Artificial Sequence
  Description of Artificial Sequence: Synthetic oligonucleotide
aaggctgggaaggtggttt

SEQ ID NO: 3669 - DNA, 19 bp, Artificial Sequence
  Description of Artificial Sequence: Synthetic oligonucleotide
aaaggctgggaaggtggtt

SEQ ID NO: 3670 - DNA, 19 bp, Artificial Sequence
  Description of Artificial Sequence: Synthetic oligonucleotide
taaaggctgggaaggtggt

SEQ ID NO: 3671 - DNA, 19 bp, Artificial Sequence
  Description of Artificial Sequence: Synthetic oligonucleotide
ataaaggctgggaaggtgg

SEQ ID NO: 3672 - DNA, 19 bp, Artificial Sequence
  Description of Artificial Sequence: Synthetic oligonucleotide
cataaaggctgggaaggtg

SEQ ID NO: 3673 - DNA, 19 bp, Artificial Sequence
  Description of Artificial Sequence: Synthetic oligonucleotide
gcataaaggctgggaaggt

SEQ ID NO: 3674 - DNA, 19 bp, Artificial Sequence
  Description of Artificial Sequence: Synthetic oligonucleotide
tgcataaaggctgggaagg

SEQ ID NO: 3675 - DNA, 19 bp, Artificial Sequence
  Description of Artificial Sequence: Synthetic oligonucleotide
ttgcataaaggctgggaag

SEQ ID NO: 3676 - DNA, 19 bp, Artificial Sequence
  Description of Artificial Sequence: Synthetic oligonucleotide
tttgcataaaggctgggaa

SEQ ID NO: 3677 - DNA, 19 bp, Artificial Sequence
  Description of Artificial Sequence: Synthetic oligonucleotide
ttttgcataaaggctggga

SEQ ID NO: 3678 - DNA, 19 bp, Artificial Sequence
  Description of Artificial Sequence: Synthetic oligonucleotide
tttttgcataaaggctggg

SEQ ID NO: 3679 - DNA, 19 bp, Artificial Sequence
  Description of Artificial Sequence: Synthetic oligonucleotide
ttttttgcataaaggctgg

SEQ ID NO: 3680 - DNA, 19 bp, Artificial Sequence
  Description of Artificial Sequence: Synthetic oligonucleotide
tttttttgcataaaggctg

SEQ ID NO: 3681 - DNA, 19 bp, Artificial Sequence
  Description of Artificial Sequence: Synthetic oligonucleotide
ctttttttgcataaaggct

SEQ ID NO: 3682 - DNA, 19 bp, Artificial Sequence
  Description of Artificial Sequence: Synthetic oligonucleotide
cctttttttgcataaaggc

SEQ ID NO: 3683 - DNA, 19 bp, Artificial Sequence
  Description of Artificial Sequence: Synthetic oligonucleotide
ccctttttttgcataaagg

SEQ ID NO: 3684 - DNA, 19 bp, Artificial Sequence
  Description of Artificial Sequence: Synthetic oligonucleotide
cccctttttttgcataaag

SEQ ID NO: 3685 - DNA, 19 bp, Artificial Sequence
  Description of Artificial Sequence: Synthetic oligonucleotide
tcccctttttttgcataaa

SEQ ID NO: 3686 - DNA, 19 bp, Artificial Sequence
  Description of Artificial Sequence: Synthetic oligonucleotide
ctcccctttttttgcataa

SEQ ID NO: 3687 - DNA, 19 bp, Artificial Sequence
  Description of Artificial Sequence: Synthetic oligonucleotide
tctcccctttttttgcata

SEQ ID NO: 3688 - DNA, 19 bp, Artificial Sequence
  Description of Artificial Sequence: Synthetic oligonucleotide
ttctcccctttttttgcat

SEQ ID NO: 3689 - DNA, 19 bp, Artificial Sequence
  Description of Artificial Sequence: Synthetic oligonucleotide
attctcccctttttttgca

SEQ ID NO: 3690 - DNA, 19 bp, Artificial Sequence
  Description of Artificial Sequence: Synthetic oligonucleotide
gattctcccctttttttgc

SEQ ID NO: 3691 - DNA, 19 bp, Artificial Sequence
  Description of Artificial Sequence: Synthetic oligonucleotide
tgattctcccctttttttg

SEQ ID NO: 3692 - DNA, 19 bp, Artificial Sequence
  Description of Artificial Sequence: Synthetic oligonucleotide
ttgattctccccttttttt

SEQ ID NO: 3693 - DNA, 19 bp, Artificial Sequence
  Description of Artificial Sequence: Synthetic oligonucleotide
tttgattctcccctttttt

SEQ ID NO: 3694 - DNA, 19 bp, Artificial Sequence
  Description of Artificial Sequence: Synthetic oligonucleotide
ctttgattctccccttttt

SEQ ID NO: 3695 - DNA, 19 bp, Artificial Sequence
  Description of Artificial Sequence: Synthetic oligonucleotide
gctttgattctcccctttt

SEQ ID NO: 3696 - DNA, 19 bp, Artificial Sequence
  Description of Artificial Sequence: Synthetic oligonucleotide
agctttgattctccccttt

SEQ ID NO: 3697 - DNA, 19 bp, Artificial Sequence
  Description of Artificial Sequence: Synthetic oligonucleotide
aagctttgattctcccctt

SEQ ID NO: 3698 - DNA, 19 bp, Artificial Sequence
  Description of Artificial Sequence: Synthetic oligonucleotide
aaagctttgattctcccct

SEQ ID NO: 3699 - DNA, 19 bp, Artificial Sequence
  Description of Artificial Sequence: Synthetic oligonucleotide
gaaagctttgattctcccc

SEQ ID NO: 3700 - DNA, 19 bp, Artificial Sequence
  Description of Artificial Sequence: Synthetic oligonucleotide
tgaaagctttgattctccc

SEQ ID NO: 3701 - DNA, 19 bp, Artificial Sequence
  Description of Artificial Sequence: Synthetic oligonucleotide
atgaaagctttgattctcc

SEQ ID NO: 3702 - DNA, 19 bp, Artificial Sequence
  Description of Artificial Sequence: Synthetic oligonucleotide
aatgaaagctttgattctc

SEQ ID NO: 3703 - DNA, 19 bp, Artificial Sequence
  Description of Artificial Sequence: Synthetic oligonucleotide
aaatgaaagctttgattct

SEQ ID NO: 3704 - DNA, 19 bp, Artificial Sequence
  Description of Artificial Sequence: Synthetic oligonucleotide
gaaatgaaagctttgattc

SEQ ID NO: 3705 - DNA, 19 bp, Artificial Sequence
  Description of Artificial Sequence: Synthetic oligonucleotide
tgaaatgaaagctttgatt

SEQ ID NO: 3706 - DNA, 19 bp, Artificial Sequence
  Description of Artificial Sequence: Synthetic oligonucleotide
ctgaaatgaaagctttgat

SEQ ID NO: 3707 - DNA, 19 bp, Artificial Sequence
  Description of Artificial Sequence: Synthetic oligonucleotide
tctgaaatgaaagctttga

SEQ ID NO: 3708 - DNA, 19 bp, Artificial Sequence
  Description of Artificial Sequence: Synthetic oligonucleotide
ttctgaaatgaaagctttg

SEQ ID NO: 3709 - DNA, 19 bp, Artificial Sequence
  Description of Artificial Sequence: Synthetic oligonucleotide
tttctgaaatgaaagcttt

SEQ ID NO: 3710 - DNA, 19 bp, Artificial Sequence
  Description of Artificial Sequence: Synthetic oligonucleotide
atttctgaaatgaaagctt

SEQ ID NO: 3711 - DNA, 19 bp, Artificial Sequence
  Description of Artificial Sequence: Synthetic oligonucleotide
catttctgaaatgaaagct

SEQ ID NO: 3712 - DNA, 19 bp, Artificial Sequence
  Description of Artificial Sequence: Synthetic oligonucleotide
acatttctgaaatgaaagc

SEQ ID NO: 3713 - DNA, 19 bp, Artificial Sequence
  Description of Artificial Sequence: Synthetic oligonucleotide
aacatttctgaaatgaaag

SEQ ID NO: 3714 - DNA, 19 bp, Artificial Sequence
  Description of Artificial Sequence: Synthetic oligonucleotide
caacatttctgaaatgaaa

SEQ ID NO: 3715 - DNA, 19 bp, Artificial Sequence
  Description of Artificial Sequence: Synthetic oligonucleotide
gcaacatttctgaaatgaa

SEQ ID NO: 3716 - DNA, 19 bp, Artificial Sequence
  Description of Artificial Sequence: Synthetic oligonucleotide
cgcaacatttctgaaatga

SEQ ID NO: 3717 - DNA, 19 bp, Artificial Sequence
  Description of Artificial Sequence: Synthetic oligonucleotide
acgcaacatttctgaaatg

SEQ ID NO: 3718 - DNA, 19 bp, Artificial Sequence
  Description of Artificial Sequence: Synthetic oligonucleotide
cacgcaacatttctgaaat

SEQ ID NO: 3719 - DNA, 19 bp, Artificial Sequence
  Description of Artificial Sequence: Synthetic oligonucleotide
ccacgcaacatttctgaaa

SEQ ID NO: 3720 - DNA, 19 bp, Artificial Sequence
  Description of Artificial Sequence: Synthetic oligonucleotide
tccacgcaacatttctgaa

SEQ ID NO: 3721 - DNA, 19 bp, Artificial Sequence
  Description of Artificial Sequence: Synthetic oligonucleotide
ttccacgcaacatttctga

SEQ ID NO: 3722 - DNA, 19 bp, Artificial Sequence
  Description of Artificial Sequence: Synthetic oligonucleotide
tttccacgcaacatttctg

SEQ ID NO: 3723 - DNA, 19 bp, Artificial Sequence
  Description of Artificial Sequence: Synthetic oligonucleotide
ttttccacgcaacatttct

SEQ ID NO: 3724 - DNA, 19 bp, Artificial Sequence
  Description of Artificial Sequence: Synthetic oligonucleotide
cttttccacgcaacatttc

SEQ ID NO: 3725 - DNA, 19 bp, Artificial Sequence
  Description of Artificial Sequence: Synthetic oligonucleotide
acttttccacgcaacattt

SEQ ID NO: 3726 - DNA, 19 bp, Artificial Sequence
  Description of Artificial Sequence: Synthetic oligonucleotide
tacttttccacgcaacatt

SEQ ID NO: 3727 - DNA, 19 bp, Artificial Sequence
  Description of Artificial Sequence: Synthetic oligonucleotide
atacttttccacgcaacat

SEQ ID NO: 3728 - DNA, 19 bp, Artificial Sequence
  Description of Artificial Sequence: Synthetic oligonucleotide
gatacttttccacgcaaca

SEQ ID NO: 3729 - DNA, 19 bp, Artificial Sequence
  Description of Artificial Sequence: Synthetic oligonucleotide
agatacttttccacgcaac

SEQ ID NO: 3730 - DNA, 19 bp, Artificial Sequence
  Description of Artificial Sequence: Synthetic oligonucleotide
cagatacttttccacgcaa

SEQ ID NO: 3731 - DNA, 19 bp, Artificial Sequence
  Description of Artificial Sequence: Synthetic oligonucleotide
acagatacttttccacgca

SEQ ID NO: 3732 - DNA, 19 bp, Artificial Sequence
  Description of Artificial Sequence: Synthetic oligonucleotide
tacagatacttttccacgc

SEQ ID NO: 3733 - DNA, 19 bp, Artificial Sequence
  Description of Artificial Sequence: Synthetic oligonucleotide
ttacagatacttttccacg

SEQ ID NO: 3734 - DNA, 19 bp, Artificial Sequence
  Description of Artificial Sequence: Synthetic oligonucleotide
attacagatacttttccac

SEQ ID NO: 3735 - DNA, 19 bp, Artificial Sequence
  Description of Artificial Sequence: Synthetic oligonucleotide
aattacagatacttttcca

SEQ ID NO: 3736 - DNA, 19 bp, Artificial Sequence
  Description of Artificial Sequence: Synthetic oligonucleotide
taattacagatacttttcc

SEQ ID NO: 3737 - DNA, 19 bp, Artificial Sequence
  Description of Artificial Sequence: Synthetic oligonucleotide
ttaattacagatacttttc

SEQ ID NO: 3738 - DNA, 19 bp, Artificial Sequence
  Description of Artificial Sequence: Synthetic oligonucleotide
tttaattacagatactttt

SEQ ID NO: 3739 - DNA, 19 bp, Artificial Sequence
  Description of Artificial Sequence: Synthetic oligonucleotide
ctttaattacagatacttt

SEQ ID NO: 3740 - DNA, 19 bp, Artificial Sequence
  Description of Artificial Sequence: Synthetic oligonucleotide
actttaattacagatactt

SEQ ID NO: 3741 - DNA, 19 bp, Artificial Sequence
  Description of Artificial Sequence: Synthetic oligonucleotide
aactttaattacagatact

SEQ ID NO: 3742 - DNA, 19 bp, Artificial Sequence
  Description of Artificial Sequence: Synthetic oligonucleotide
aaactttaattacagatac

SEQ ID NO: 3743 - DNA, 19 bp, Artificial Sequence
  Description of Artificial Sequence: Synthetic oligonucleotide
gaaactttaattacagata

SEQ ID NO: 3744 - DNA, 19 bp, Artificial Sequence
  Description of Artificial Sequence: Synthetic oligonucleotide
cgaaactttaattacagat

SEQ ID NO: 3745 - DNA, 19 bp, Artificial Sequence
  Description of Artificial Sequence: Synthetic oligonucleotide
tcgaaactttaattacaga

SEQ ID NO: 3746 - DNA, 19 bp, Artificial Sequence
  Description of Artificial Sequence: Synthetic oligonucleotide
ttcgaaactttaattacag

SEQ ID NO: 3747 - DNA, 19 bp, Artificial Sequence
  Description of Artificial Sequence: Synthetic oligonucleotide
cttcgaaactttaattaca

SEQ ID NO: 3748 - DNA, 19 bp, Artificial Sequence
  Description of Artificial Sequence: Synthetic oligonucleotide
acttcgaaactttaattac

SEQ ID NO: 3749 - DNA, 19 bp, Artificial Sequence
  Description of Artificial Sequence: Synthetic oligonucleotide
tacttcgaaactttaatta

SEQ ID NO: 3750 - DNA, 19 bp, Artificial Sequence
  Description of Artificial Sequence: Synthetic oligonucleotide
ttacttcgaaactttaatt

SEQ ID NO: 3751 - DNA, 19 bp, Artificial Sequence
  Description of Artificial Sequence: Synthetic oligonucleotide
attacttcgaaactttaat

SEQ ID NO: 3752 - DNA, 19 bp, Artificial Sequence
  Description of Artificial Sequence: Synthetic oligonucleotide
aattacttcgaaactttaa

SEQ ID NO: 3753 - DNA, 19 bp, Artificial Sequence
  Description of Artificial Sequence: Synthetic oligonucleotide
aaattacttcgaaacttta

SEQ ID NO: 3754 - DNA, 19 bp, Artificial Sequence
  Description of Artificial Sequence: Synthetic oligonucleotide
taaattacttcgaaacttt

SEQ ID NO: 3755 - DNA, 19 bp, Artificial Sequence
  Description of Artificial Sequence: Synthetic oligonucleotide
ttaaattacttcgaaactt

SEQ ID NO: 3756 - DNA, 19 bp, Artificial Sequence
  Description of Artificial Sequence: Synthetic oligonucleotide
gttaaattacttcgaaact

SEQ ID NO: 3757 - DNA, 19 bp, Artificial Sequence
  Description of Artificial Sequence: Synthetic oligonucleotide
ggttaaattacttcgaaac

SEQ ID NO: 3758 - DNA, 19 bp, Artificial Sequence
  Description of Artificial Sequence: Synthetic oligonucleotide
aggttaaattacttcgaaa

SEQ ID NO: 3759 - DNA, 19 bp, Artificial Sequence
  Description of Artificial Sequence: Synthetic oligonucleotide
taggttaaattacttcgaa

SEQ ID NO: 3760 - DNA, 19 bp, Artificial Sequence
  Description of Artificial Sequence: Synthetic oligonucleotide
ttaggttaaattacttcga

SEQ ID NO: 3761 - DNA, 19 bp, Artificial Sequence
  Description of Artificial Sequence: Synthetic oligonucleotide
tttaggttaaattacttcg

SEQ ID NO: 3762 - DNA, 19 bp, Artificial Sequence
  Description of Artificial Sequence: Synthetic oligonucleotide
ttttaggttaaattacttc

SEQ ID NO: 3763 - DNA, 19 bp, Artificial Sequence
  Description of Artificial Sequence: Synthetic oligonucleotide
tttttaggttaaattactt

SEQ ID NO: 3764 - DNA, 19 bp, Artificial Sequence
  Description of Artificial Sequence: Synthetic oligonucleotide
ttttttaggttaaattact

SEQ ID NO: 3765 - DNA, 19 bp, Artificial Sequence
  Description of Artificial Sequence: Synthetic oligonucleotide
tttttttaggttaaattac

SEQ ID NO: 3766 - DNA, 19 bp, Artificial Sequence
  Description of Artificial Sequence: Synthetic oligonucleotide
ttttttttaggttaaatta

SEQ ID NO: 3767 - DNA, 19 bp, Artificial Sequence
  Description of Artificial Sequence: Synthetic oligonucleotide
tttttttttaggttaaatt

SEQ ID NO: 3768 - DNA, 19 bp, Artificial Sequence
  Description of Artificial Sequence: Synthetic oligonucleotide
ttttttttttaggttaaat

SEQ ID NO: 3769 - DNA, 19 bp, Artificial Sequence
  Description of Artificial Sequence: Synthetic oligonucleotide
tttttttttttaggttaaa

SEQ ID NO: 3770 - DNA, 19 bp, Artificial Sequence
  Description of Artificial Sequence: Synthetic oligonucleotide
ttttttttttttaggttaa

SEQ ID NO: 3771 - DNA, 19 bp, Artificial Sequence
  Description of Artificial Sequence: Synthetic oligonucleotide
tttttttttttttaggtta

SEQ ID NO: 3772 - DNA, 19 bp, Artificial Sequence
  Description of Artificial Sequence: Synthetic oligonucleotide
ttttttttttttttaggtt

SEQ ID NO: 3773 - DNA, 19 bp, Artificial Sequence
  Description of Artificial Sequence: Synthetic oligonucleotide
tttttttttttttttaggt

SEQ ID NO: 3774 - DNA, 19 bp, Artificial Sequence
  Description of Artificial Sequence: Synthetic oligonucleotide
ttttttttttttttttagg

SEQ ID NO: 3775 - DNA, 19 bp, Artificial Sequence
  Description of Artificial Sequence: Synthetic oligonucleotide
tttttttttttttttttag

SEQ ID NO: 3776 - DNA, 19 bp, Artificial Sequence
  Description of Artificial Sequence: Synthetic oligonucleotide
tttttttttttttttttta

SEQ ID NO: 3777 - DNA, 19 bp, Artificial Sequence
  Description of Artificial Sequence: Synthetic oligonucleotide
agcggccactgtacctctg

SEQ ID NO: 3778 - DNA, 19 bp, Artificial Sequence
  Description of Artificial Sequence: Synthetic oligonucleotide
gcggccactgtacctctga

SEQ ID NO: 3779 - DNA, 19 bp, Artificial Sequence
  Description of Artificial Sequence: Synthetic oligonucleotide
cggccactgtacctctgag

SEQ ID NO: 3780 - DNA, 19 bp, Artificial Sequence
  Description of Artificial Sequence: Synthetic oligonucleotide
ggccactgtacctctgagc

SEQ ID NO: 3781 - DNA, 19 bp, Artificial Sequence
  Description of Artificial Sequence: Synthetic oligonucleotide
gccactgtacctctgagct

SEQ ID NO: 3782 - DNA, 19 bp, Artificial Sequence
  Description of Artificial Sequence: Synthetic oligonucleotide
ccactgtacctctgagctg

SEQ ID NO: 3783 - DNA, 19 bp, Artificial Sequence
  Description of Artificial Sequence: Synthetic oligonucleotide
cactgtacctctgagctgt

SEQ ID NO: 3784 - DNA, 19 bp, Artificial Sequence
  Description of Artificial Sequence: Synthetic oligonucleotide
actgtacctctgagctgtg

SEQ ID NO: 3785 - DNA, 19 bp, Artificial Sequence
  Description of Artificial Sequence: Synthetic oligonucleotide
ctgtacctctgagctgtgc

SEQ ID NO: 3786 - DNA, 19 bp, Artificial Sequence
  Description of Artificial Sequence: Synthetic oligonucleotide
tgtacctctgagctgtgca

SEQ ID NO: 3787 - DNA, 19 bp, Artificial Sequence
  Description of Artificial Sequence: Synthetic oligonucleotide
gtacctctgagctgtgcac

SEQ ID NO: 3788 - DNA, 19 bp, Artificial Sequence
  Description of Artificial Sequence: Synthetic oligonucleotide
tacctctgagctgtgcacg

SEQ ID NO: 3789 - DNA, 19 bp, Artificial Sequence
  Description of Artificial Sequence: Synthetic oligonucleotide
acctctgagctgtgcacgc

SEQ ID NO: 3790 - DNA, 19 bp, Artificial Sequence
  Description of Artificial Sequence: Synthetic oligonucleotide
cctctgagctgtgcacgcc

SEQ ID NO: 3791 - DNA, 19 bp, Artificial Sequence
  Description of Artificial Sequence: Synthetic oligonucleotide
ctctgagctgtgcacgccg

SEQ ID NO: 3792 - DNA, 19 bp, Artificial Sequence
  Description of Artificial Sequence: Synthetic oligonucleotide
tctgagctgtgcacgccgc

SEQ ID NO: 3793 - DNA, 19 bp, Artificial Sequence
  Description of Artificial Sequence: Synthetic oligonucleotide
ctgagctgtgcacgccgcg

SEQ ID NO: 3794 - DNA, 19 bp, Artificial Sequence
  Description of Artificial Sequence: Synthetic oligonucleotide
tgagctgtgcacgccgcgg

SEQ ID NO: 3795 - DNA, 19 bp, Artificial Sequence
  Description of Artificial Sequence: Synthetic oligonucleotide
gagctgtgcacgccgcggc

SEQ ID NO: 3796 - DNA, 19 bp, Artificial Sequence
  Description of Artificial Sequence: Synthetic oligonucleotide
agctgtgcacgccgcggcc

SEQ ID NO: 3797 - DNA, 19 bp, Artificial Sequence
  Description of Artificial Sequence: Synthetic oligonucleotide
gctgtgcacgccgcggccg

SEQ ID NO: 3798 - DNA, 19 bp, Artificial Sequence
  Description of Artificial Sequence: Synthetic oligonucleotide
ctgtgcacgccgcggccgg

SEQ ID NO: 3799 - DNA, 19 bp, Artificial Sequence
  Description of Artificial Sequence: Synthetic oligonucleotide
tgtgcacgccgcggccggg

SEQ ID NO: 3800 - DNA, 19 bp, Artificial Sequence
  Description of Artificial Sequence: Synthetic oligonucleotide
gtgcacgccgcggccgggg

SEQ ID NO: 3801 - DNA, 19 bp, Artificial Sequence
  Description of Artificial Sequence: Synthetic oligonucleotide
tgcacgccgcggccggggc

SEQ ID NO: 3802 - DNA, 19 bp, Artificial Sequence
  Description of Artificial Sequence: Synthetic oligonucleotide
gcacgccgcggccggggcg

SEQ ID NO: 3803 - DNA, 19 bp, Artificial Sequence
  Description of Artificial Sequence: Synthetic oligonucleotide
cacgccgcggccggggcgg

SEQ ID NO: 3804 - DNA, 19 bp, Artificial Sequence
  Description of Artificial Sequence: Synthetic oligonucleotide
acgccgcggccggggcggg

SEQ ID NO: 3805 - DNA, 19 bp, Artificial Sequence
  Description of Artificial Sequence: Synthetic oligonucleotide
cgccgcggccggggcgggc

SEQ ID NO: 3806 - DNA, 19 bp, Artificial Sequence
  Description of Artificial Sequence: Synthetic oligonucleotide
gccgcggccggggcgggcc

SEQ ID NO: 3807 - DNA, 19 bp, Artificial Sequence
  Description of Artificial Sequence: Synthetic oligonucleotide
ccgcggccggggcgggcct

SEQ ID NO: 3808 - DNA, 19 bp, Artificial Sequence
  Description of Artificial Sequence: Synthetic oligonucleotide
cgcggccggggcgggcctc

SEQ ID NO: 3809 - DNA, 19 bp, Artificial Sequence
  Description of Artificial Sequence: Synthetic oligonucleotide
gcggccggggcgggcctcg

SEQ ID NO: 3810 - DNA, 19 bp, Artificial Sequence
  Description of Artificial Sequence: Synthetic oligonucleotide
cggccggggcgggcctcgg

SEQ ID NO: 3811 - DNA, 19 bp, Artificial Sequence
  Description of Artificial Sequence: Synthetic oligonucleotide
ggccggggcgggcctcggg

SEQ ID NO: 3812 - DNA, 19 bp, Artificial Sequence
  Description of Artificial Sequence: Synthetic oligonucleotide
gccggggcgggcctcggga

SEQ ID NO: 3813 - DNA, 19 bp, Artificial Sequence
  Description of Artificial Sequence: Synthetic oligonucleotide
ccggggcgggcctcgggac

SEQ ID NO: 3814 - DNA, 19 bp, Artificial Sequence
  Description of Artificial Sequence: Synthetic oligonucleotide
cggggcgggcctcgggact

SEQ ID NO: 3815 - DNA, 19 bp, Artificial Sequence
  Description of Artificial Sequence: Synthetic oligonucleotide
ggggcgggcctcgggactg

SEQ ID NO: 3816 - DNA, 19 bp, Artificial Sequence
  Description of Artificial Sequence: Synthetic oligonucleotide
gggcgggcctcgggactgg

SEQ ID NO: 3817 - DNA, 19 bp, Artificial Sequence
  Description of Artificial Sequence: Synthetic oligonucleotide
ggcgggcctcgggactggg

SEQ ID NO: 3818 - DNA, 19 bp, Artificial Sequence
  Description of Artificial Sequence: Synthetic oligonucleotide
gcgggcctcgggactgggg

SEQ ID NO: 3819 - DNA, 19 bp, Artificial Sequence
  Description of Artificial Sequence: Synthetic oligonucleotide
cgggcctcgggactggggc

SEQ ID NO: 3820 - DNA, 19 bp, Artificial Sequence
  Description of Artificial Sequence: Synthetic oligonucleotide
gggcctcgggactggggct

SEQ ID NO: 3821 - DNA, 19 bp, Artificial Sequence
  Description of Artificial Sequence: Synthetic oligonucleotide
ggcctcgggactggggctg

SEQ ID NO: 3822 - DNA, 19 bp, Artificial Sequence
  Description of Artificial Sequence: Synthetic oligonucleotide
gcctcgggactggggctgg

SEQ ID NO: 3823 - DNA, 19 bp, Artificial Sequence
  Description of Artificial Sequence: Synthetic oligonucleotide
cctcgggactggggctggg

SEQ ID NO: 3824 - DNA, 19 bp, Artificial Sequence
  Description of Artificial Sequence: Synthetic oligonucleotide
ctcgggactggggctggga

SEQ ID NO: 3825 - DNA, 19 bp, Artificial Sequence
  Description of Artificial Sequence: Synthetic oligonucleotide
tcgggactggggctgggag

SEQ ID NO: 3826 - DNA, 19 bp, Artificial Sequence
  Description of Artificial Sequence: Synthetic oligonucleotide
cgggactggggctgggagc

SEQ ID NO: 3827 - DNA, 19 bp, Artificial Sequence
  Description of Artificial Sequence: Synthetic oligonucleotide
gggactggggctgggagcc

SEQ ID NO: 3828 - DNA, 19 bp, Artificial Sequence
  Description of Artificial Sequence: Synthetic oligonucleotide
ggactggggctgggagcca

SEQ ID NO: 3829 - DNA, 19 bp, Artificial Sequence
  Description of Artificial Sequence: Synthetic oligonucleotide
gactggggctgggagccaa

SEQ ID NO: 3830 - DNA, 19 bp, Artificial Sequence
  Description of Artificial Sequence: Synthetic oligonucleotide
actggggctgggagccaag

SEQ ID NO: 3831 - DNA, 19 bp, Artificial Sequence
  Description of Artificial Sequence: Synthetic oligonucleotide
ctggggctgggagccaagg

SEQ ID NO: 3832 - DNA, 19 bp, Artificial Sequence
  Description of Artificial Sequence: Synthetic oligonucleotide
tggggctgggagccaaggg

SEQ ID NO: 3833 - DNA, 19 bp, Artificial Sequence
  Description of Artificial Sequence: Synthetic oligonucleotide
ggggctgggagccaagggg

SEQ ID NO: 3834 - DNA, 19 bp, Artificial Sequence
  Description of Artificial Sequence: Synthetic oligonucleotide
gggctgggagccaaggggc

SEQ ID NO: 3835 - DNA, 19 bp, Artificial Sequence
  Description of Artificial Sequence: Synthetic oligonucleotide
ggctgggagccaaggggcc

SEQ ID NO: 3836 - DNA, 19 bp, Artificial Sequence
  Description of Artificial Sequence: Synthetic oligonucleotide
gctgggagccaaggggccg

SEQ ID NO: 3837 - DNA, 19 bp, Artificial Sequence
  Description of Artificial Sequence: Synthetic oligonucleotide
ctgggagccaaggggccgg

SEQ ID NO: 3838 - DNA, 19 bp, Artificial Sequence
  Description of Artificial Sequence: Synthetic oligonucleotide
tgggagccaaggggccggg

SEQ ID NO: 3839 - DNA, 19 bp, Artificial Sequence
  Description of Artificial Sequence: Synthetic oligonucleotide
gggagccaaggggccgggg

SEQ ID NO: 3840 - DNA, 19 bp, Artificial Sequence
  Description of Artificial Sequence: Synthetic oligonucleotide
ggagccaaggggccggggc

SEQ ID NO: 3841 - DNA, 19 bp, Artificial Sequence
  Description of Artificial Sequence: Synthetic oligonucleotide
gagccaaggggccggggcg

SEQ ID NO: 3842 - DNA, 19 bp, Artificial Sequence
  Description of Artificial Sequence: Synthetic oligonucleotide
agccaaggggccggggcgg

SEQ ID NO: 3843 - DNA, 19 bp, Artificial Sequence
  Description of Artificial Sequence: Synthetic oligonucleotide
gccaaggggccggggcggg

SEQ ID NO: 3844 - DNA, 19 bp, Artificial Sequence
  Description of Artificial Sequence: Synthetic oligonucleotide
ccaaggggccggggcggga

SEQ ID NO: 3845 - DNA, 19 bp, Artificial Sequence
  Description of Artificial Sequence: Synthetic oligonucleotide
caaggggccggggcgggac

SEQ ID NO: 3846 - DNA, 19 bp, Artificial Sequence
  Description of Artificial Sequence: Synthetic oligonucleotide
aaggggccggggcgggacg

SEQ ID NO: 3847 - DNA, 19 bp, Artificial Sequence
  Description of Artificial Sequence: Synthetic oligonucleotide
aggggccggggcgggacgc

SEQ ID NO: 3848 - DNA, 19 bp, Artificial Sequence
  Description of Artificial Sequence: Synthetic oligonucleotide
ggggccggggcgggacgcg

SEQ ID NO: 3849 - DNA, 19 bp, Artificial Sequence
  Description of Artificial Sequence: Synthetic oligonucleotide
gggccggggcgggacgcgg

SEQ ID NO: 3850 - DNA, 19 bp, Artificial Sequence
  Description of Artificial Sequence: Synthetic oligonucleotide
ggccggggcgggacgcgga

SEQ ID NO: 3851 - DNA, 19 bp, Artificial Sequence
  Description of Artificial Sequence: Synthetic oligonucleotide
gccggggcgggacgcggag

SEQ ID NO: 3852 - DNA, 19 bp, Artificial Sequence
  Description of Artificial Sequence: Synthetic oligonucleotide
ccggggcgggacgcggaga

SEQ ID NO: 3853 - DNA, 19 bp, Artificial Sequence
  Description of Artificial Sequence: Synthetic oligonucleotide
cggggcgggacgcggagag

SEQ ID NO: 3854 - DNA, 19 bp, Artificial Sequence
  Description of Artificial Sequence: Synthetic oligonucleotide
ggggcgggacgcggagagg

SEQ ID NO: 3855 - DNA, 19 bp, Artificial Sequence
  Description of Artificial Sequence: Synthetic oligonucleotide
gggcgggacgcggagaggc

SEQ ID NO: 3856 - DNA, 19 bp, Artificial Sequence
  Description of Artificial Sequence: Synthetic oligonucleotide
ggcgggacgcggagaggct

SEQ ID NO: 3857 - DNA, 19 bp, Artificial Sequence
  Description of Artificial Sequence: Synthetic oligonucleotide
gcgggacgcggagaggctg

SEQ ID NO: 3858 - DNA, 19 bp, Artificial Sequence
  Description of Artificial Sequence: Synthetic oligonucleotide
cgggacgcggagaggctgg

SEQ ID NO: 3859 - DNA, 19 bp, Artificial Sequence
  Description of Artificial Sequence: Synthetic oligonucleotide
gggacgcggagaggctggg

SEQ ID NO: 3860 - DNA, 19 bp, Artificial Sequence
  Description of Artificial Sequence: Synthetic oligonucleotide
ggacgcggagaggctgggc

SEQ ID NO: 3861 - DNA, 19 bp, Artificial Sequence
  Description of Artificial Sequence: Synthetic oligonucleotide
gacgcggagaggctgggct

SEQ ID NO: 3862 - DNA, 19 bp, Artificial Sequence
  Description of Artificial Sequence: Synthetic oligonucleotide
acgcggagaggctgggctg

SEQ ID NO: 3863 - DNA, 19 bp, Artificial Sequence
  Description of Artificial Sequence: Synthetic oligonucleotide
cgcggagaggctgggctgc

SEQ ID NO: 3864 - DNA, 19 bp, Artificial Sequence
  Description of Artificial Sequence: Synthetic oligonucleotide
gcggagaggctgggctgcg

SEQ ID NO: 3865 - DNA, 19 bp, Artificial Sequence
  Description of Artificial Sequence: Synthetic oligonucleotide
cggagaggctgggctgcgg

SEQ ID NO: 3866 - DNA, 19 bp, Artificial Sequence
  Description of Artificial Sequence: Synthetic oligonucleotide
ggagaggctgggctgcggt

SEQ ID NO: 3867 - DNA, 19 bp, Artificial Sequence
  Description of Artificial Sequence: Synthetic oligonucleotide
gagaggctgggctgcggtt

SEQ ID NO: 3868 - DNA, 19 bp, Artificial Sequence
  Description of Artificial Sequence: Synthetic oligonucleotide
agaggctgggctgcggttc

SEQ ID NO: 3869 - DNA, 19 bp, Artificial Sequence
  Description of Artificial Sequence: Synthetic oligonucleotide
gaggctgggctgcggttcg

SEQ ID NO: 3870 - DNA, 19 bp, Artificial Sequence
  Description of Artificial Sequence: Synthetic oligonucleotide
aggctgggctgcggttcgg

SEQ ID NO: 3871 - DNA, 19 bp, Artificial Sequence
  Description of Artificial Sequence: Synthetic oligonucleotide
ggctgggctgcggttcgga

SEQ ID NO: 3872 - DNA, 19 bp, Artificial Sequence
  Description of Artificial Sequence: Synthetic oligonucleotide
gctgggctgcggttcggag

SEQ ID NO: 3873 - DNA, 19 bp, Artificial Sequence
  Description of Artificial Sequence: Synthetic oligonucleotide
ctgggctgcggttcggagt

SEQ ID NO: 3874 - DNA, 19 bp, Artificial Sequence
  Description of Artificial Sequence: Synthetic oligonucleotide
tgggctgcggttcggagtc

SEQ ID NO: 3875 - DNA, 19 bp, Artificial Sequence
  Description of Artificial Sequence: Synthetic oligonucleotide
gggctgcggttcggagtcc

SEQ ID NO: 3876 - DNA, 19 bp, Artificial Sequence
  Description of Artificial Sequence: Synthetic oligonucleotide
ggctgcggttcggagtccc

SEQ ID NO: 3877 - DNA, 19 bp, Artificial Sequence
  Description of Artificial Sequence: Synthetic oligonucleotide
gctgcggttcggagtcccg

SEQ ID NO: 3878 - DNA, 19 bp, Artificial Sequence
  Description of Artificial Sequence: Synthetic oligonucleotide
ctgcggttcggagtcccgc

SEQ ID NO: 3879 - DNA, 19 bp, Artificial Sequence
  Description of Artificial Sequence: Synthetic oligonucleotide
tgcggttcggagtcccgcg

SEQ ID NO: 3880 - DNA, 19 bp, Artificial Sequence
  Description of Artificial Sequence: Synthetic oligonucleotide
gcggttcggagtcccgcgc

SEQ ID NO: 3881 - DNA, 19 bp, Artificial Sequence
  Description of Artificial Sequence: Synthetic oligonucleotide
cggttcggagtcccgcgcg

SEQ ID NO: 3882 - DNA, 19 bp, Artificial Sequence
  Description of Artificial Sequence: Synthetic oligonucleotide
ggttcggagtcccgcgcgg

SEQ ID NO: 3883 - DNA, 19 bp, Artificial Sequence
  Description of Artificial Sequence: Synthetic oligonucleotide
gttcggagtcccgcgcgga

SEQ ID NO: 3884 - DNA, 19 bp, Artificial Sequence
  Description of Artificial Sequence: Synthetic oligonucleotide
ttcggagtcccgcgcggac

SEQ ID NO: 3885 - DNA, 19 bp, Artificial Sequence
  Description of Artificial Sequence: Synthetic oligonucleotide
tcggagtcccgcgcggaca

SEQ ID NO: 3886 - DNA, 19 bp, Artificial Sequence
  Description of Artificial Sequence: Synthetic oligonucleotide
cggagtcccgcgcggacag

SEQ ID NO: 3887 - DNA, 19 bp, Artificial Sequence
  Description of Artificial Sequence: Synthetic oligonucleotide
ggagtcccgcgcggacagg

SEQ ID NO: 3888 - DNA, 19 bp, Artificial Sequence
  Description of Artificial Sequence: Synthetic oligonucleotide
gagtcccgcgcggacaggg

SEQ ID NO: 3889 - DNA, 19 bp, Artificial Sequence
  Description of Artificial Sequence: Synthetic oligonucleotide
agtcccgcgcggacagggg

SEQ ID NO: 3890 - DNA, 19 bp, Artificial Sequence
  Description of Artificial Sequence: Synthetic oligonucleotide
gtcccgcgcggacaggggc

SEQ ID NO: 3891 - DNA, 19 bp, Artificial Sequence
  Description of Artificial Sequence: Synthetic oligonucleotide
tcccgcgcggacaggggcc

SEQ ID NO: 3892 - DNA, 19 bp, Artificial Sequence
  Description of Artificial Sequence: Synthetic oligonucleotide
cccgcgcggacaggggccg

SEQ ID NO: 3893 - DNA, 19 bp, Artificial Sequence
  Description of Artificial Sequence: Synthetic oligonucleotide
ccgcgcggacaggggccgg

SEQ ID NO: 3894 - DNA, 19 bp, Artificial Sequence
  Description of Artificial Sequence: Synthetic oligonucleotide
cgcgcggacaggggccgga

SEQ ID NO: 3895 - DNA, 19 bp, Artificial Sequence
  Description of Artificial Sequence: Synthetic oligonucleotide
gcgcggacaggggccggac

SEQ ID NO: 3896 - DNA, 19 bp, Artificial Sequence
  Description of Artificial Sequence: Synthetic oligonucleotide
cgcggacaggggccggacg

SEQ ID NO: 3897 - DNA, 19 bp, Artificial Sequence
  Description of Artificial Sequence: Synthetic oligonucleotide
gcggacaggggccggacgg

SEQ ID NO: 3898 - DNA, 19 bp, Artificial Sequence
  Description of Artificial Sequence: Synthetic oligonucleotide
cggacaggggccggacggc

SEQ ID NO: 3899 - DNA, 19 bp, Artificial Sequence
  Description of Artificial Sequence: Synthetic oligonucleotide
ggacaggggccggacggcg

SEQ ID NO: 3900 - DNA, 19 bp, Artificial Sequence
  Description of Artificial Sequence: Synthetic oligonucleotide
gacaggggccggacggcgg

SEQ ID NO: 3901 - DNA, 19 bp, Artificial Sequence
  Description of Artificial Sequence: Synthetic oligonucleotide
acaggggccggacggcggc

SEQ ID NO: 3902 - DNA, 19 bp, Artificial Sequence
  Description of Artificial Sequence: Synthetic oligonucleotide
caggggccggacggcggcg

SEQ ID NO: 3903 - DNA, 19 bp, Artificial Sequence
  Description of Artificial Sequence: Synthetic oligonucleotide
aggggccggacggcggcga

SEQ ID NO: 3904 - DNA, 19 bp, Artificial Sequence
  Description of Artificial Sequence: Synthetic oligonucleotide
ggggccggacggcggcgag

SEQ ID NO: 3905 - DNA, 19 bp, Artificial Sequence
  Description of Artificial Sequence: Synthetic oligonucleotide
gggccggacggcggcgagg

SEQ ID NO: 3906 - DNA, 19 bp, Artificial Sequence
  Description of Artificial Sequence: Synthetic oligonucleotide
ggccggacggcggcgaggg

SEQ ID NO: 3907 - DNA, 19 bp, Artificial Sequence
  Description of Artificial Sequence: Synthetic oligonucleotide
gccggacggcggcgaggga

SEQ ID NO: 3908 - DNA, 19 bp, Artificial Sequence
  Description of Artificial Sequence: Synthetic oligonucleotide
ccggacggcggcgagggag

SEQ ID NO: 3909 - DNA, 19 bp, Artificial Sequence
  Description of Artificial Sequence: Synthetic oligonucleotide
cggacggcggcgagggagc

SEQ ID NO: 3910 - DNA, 19 bp, Artificial Sequence
  Description of Artificial Sequence: Synthetic oligonucleotide
ggacggcggcgagggagcg

SEQ ID NO: 3911 - DNA, 19 bp, Artificial Sequence
  Description of Artificial Sequence: Synthetic oligonucleotide
gacggcggcgagggagcgc

SEQ ID NO: 3912 - DNA, 19 bp, Artificial Sequence
  Description of Artificial Sequence: Synthetic oligonucleotide
acggcggcgagggagcgcg

SEQ ID NO: 3913 - DNA, 19 bp, Artificial Sequence
  Description of Artificial Sequence: Synthetic oligonucleotide
cggcggcgagggagcgcgc

SEQ ID NO: 3914 - DNA, 19 bp, Artificial Sequence
  Description of Artificial Sequence: Synthetic oligonucleotide
ggcggcgagggagcgcgcg

SEQ ID NO: 3915 - DNA, 19 bp, Artificial Sequence
  Description of Artificial Sequence: Synthetic oligonucleotide
gcggcgagggagcgcgcgc

SEQ ID NO: 3916 - DNA, 19 bp, Artificial Sequence
  Description of Artificial Sequence: Synthetic oligonucleotide
cggcgagggagcgcgcgcc

SEQ ID NO: 3917 - DNA, 19 bp, Artificial Sequence
  Description of Artificial Sequence: Synthetic oligonucleotide
ggcgagggagcgcgcgccc

SEQ ID NO: 3918 - DNA, 19 bp, Artificial Sequence
  Description of Artificial Sequence: Synthetic oligonucleotide
gcgagggagcgcgcgcccc

SEQ ID NO: 3919 - DNA, 19 bp, Artificial Sequence
  Description of Artificial Sequence: Synthetic oligonucleotide
cgagggagcgcgcgccccg

SEQ ID NO: 3920 - DNA, 19 bp, Artificial Sequence
  Description of Artificial Sequence: Synthetic oligonucleotide
gagggagcgcgcgccccgc

SEQ ID NO: 3921 - DNA, 19 bp, Artificial Sequence
  Description of Artificial Sequence: Synthetic oligonucleotide
agggagcgcgcgccccgca

SEQ ID NO: 3922 - DNA, 19 bp, Artificial Sequence
  Description of Artificial Sequence: Synthetic oligonucleotide
gggagcgcgcgccccgcag

SEQ ID NO: 3923 - DNA, 19 bp, Artificial Sequence
  Description of Artificial Sequence: Synthetic oligonucleotide
ggagcgcgcgccccgcagt

SEQ ID NO: 3924 - DNA, 19 bp, Artificial Sequence
  Description of Artificial Sequence: Synthetic oligonucleotide
gagcgcgcgccccgcagtc

SEQ ID NO: 3925 - DNA, 19 bp, Artificial Sequence
  Description of Artificial Sequence: Synthetic oligonucleotide
agcgcgcgccccgcagtcc

SEQ ID NO: 3926 - DNA, 19 bp, Artificial Sequence
  Description of Artificial Sequence: Synthetic oligonucleotide
gcgcgcgccccgcagtccc

SEQ ID NO: 3927 - DNA, 19 bp, Artificial Sequence
  Description of Artificial Sequence: Synthetic oligonucleotide
cgcgcgccccgcagtcccg

SEQ ID NO: 3928 - DNA, 19 bp, Artificial Sequence
  Description of Artificial Sequence: Synthetic oligonucleotide
gcgcgccccgcagtcccgc

SEQ ID NO: 3929 - DNA, 19 bp, Artificial Sequence
  Description of Artificial Sequence: Synthetic oligonucleotide
cgcgccccgcagtcccgcg

SEQ ID NO: 3930 - DNA, 19 bp, Artificial Sequence
  Description of Artificial Sequence: Synthetic oligonucleotide
gcgccccgcagtcccgcgc

SEQ ID NO: 3931 - DNA, 19 bp, Artificial Sequence
  Description of Artificial Sequence: Synthetic oligonucleotide
cgccccgcagtcccgcgct

SEQ ID NO: 3932 - DNA, 19 bp, Artificial Sequence
  Description of Artificial Sequence: Synthetic oligonucleotide
gccccgcagtcccgcgctg

SEQ ID NO: 3933 - DNA, 19 bp, Artificial Sequence
  Description of Artificial Sequence: Synthetic oligonucleotide
ccccgcagtcccgcgctgc

SEQ ID NO: 3934 - DNA, 19 bp, Artificial Sequence
  Description of Artificial Sequence: Synthetic oligonucleotide
cccgcagtcccgcgctgcg

SEQ ID NO: 3935 - DNA, 19 bp, Artificial Sequence
  Description of Artificial Sequence: Synthetic oligonucleotide
ccgcagtcccgcgctgcgc

SEQ ID NO: 3936 - DNA, 19 bp, Artificial Sequence
  Description of Artificial Sequence: Synthetic oligonucleotide
cgcagtcccgcgctgcgcc

SEQ ID NO: 3937 - DNA, 19 bp, Artificial Sequence
  Description of Artificial Sequence: Synthetic oligonucleotide
gcagtcccgcgctgcgccg

SEQ ID NO: 3938 - DNA, 19 bp, Artificial Sequence
  Description of Artificial Sequence: Synthetic oligonucleotide
cagtcccgcgctgcgccgg

SEQ ID NO: 3939 - DNA, 19 bp, Artificial Sequence
  Description of Artificial Sequence: Synthetic oligonucleotide
agtcccgcgctgcgccggc

SEQ ID NO: 3940 - DNA, 19 bp, Artificial Sequence
  Description of Artificial Sequence: Synthetic oligonucleotide
gtcccgcgctgcgccggcc

SEQ ID NO: 3941 - DNA, 19 bp, Artificial Sequence
  Description of Artificial Sequence: Synthetic oligonucleotide
tcccgcgctgcgccggccg

SEQ ID NO: 3942 - DNA, 19 bp, Artificial Sequence
  Description of Artificial Sequence: Synthetic oligonucleotide
cccgcgctgcgccggccgg

SEQ ID NO: 3943 - DNA, 19 bp, Artificial Sequence
  Description of Artificial Sequence: Synthetic oligonucleotide
ccgcgctgcgccggccggg

SEQ ID NO: 3944 - DNA, 19 bp, Artificial Sequence
  Description of Artificial Sequence: Synthetic oligonucleotide
cgcgctgcgccggccgggg

SEQ ID NO: 3945 - DNA, 19 bp, Artificial Sequence
  Description of Artificial Sequence: Synthetic oligonucleotide
gcgctgcgccggccgggga

SEQ ID NO: 3946 - DNA, 19 bp, Artificial Sequence
  Description of Artificial Sequence: Synthetic oligonucleotide
cgctgcgccggccggggat

SEQ ID NO: 3947 - DNA, 19 bp, Artificial Sequence
  Description of Artificial Sequence: Synthetic oligonucleotide
gctgcgccggccggggatg

SEQ ID NO: 3948 - DNA, 19 bp, Artificial Sequence
  Description of Artificial Sequence: Synthetic oligonucleotide
ctgcgccggccggggatgg

SEQ ID NO: 3949 - DNA, 19 bp, Artificial Sequence
  Description of Artificial Sequence: Synthetic oligonucleotide
tgcgccggccggggatggg

SEQ ID NO: 3950 - DNA, 19 bp, Artificial Sequence
  Description of Artificial Sequence: Synthetic oligonucleotide
gcgccggccggggatgggg

SEQ ID NO: 3951 - DNA, 19 bp, Artificial Sequence
  Description of Artificial Sequence: Synthetic oligonucleotide
cgccggccggggatggggc

SEQ ID NO: 3952 - DNA, 19 bp, Artificial Sequence
  Description of Artificial Sequence: Synthetic oligonucleotide
gccggccggggatggggcg

SEQ ID NO: 3953 - DNA, 19 bp, Artificial Sequence
  Description of Artificial Sequence: Synthetic oligonucleotide
ccggccggggatggggcgc

SEQ ID NO: 3954 - DNA, 19 bp, Artificial Sequence
  Description of Artificial Sequence: Synthetic oligonucleotide
cggccggggatggggcgcg

SEQ ID NO: 3955 - DNA, 19 bp, Artificial Sequence
  Description of Artificial Sequence: Synthetic oligonucleotide
ggccggggatggggcgcgc

SEQ ID NO: 3956 - DNA, 19 bp, Artificial Sequence
  Description of Artificial Sequence: Synthetic oligonucleotide
gccggggatggggcgcgct

SEQ ID NO: 3957 - DNA, 19 bp, Artificial Sequence
  Description of Artificial Sequence: Synthetic oligonucleotide
ccggggatggggcgcgctg

SEQ ID NO: 3958 - DNA, 19 bp, Artificial Sequence
  Description of Artificial Sequence: Synthetic oligonucleotide
cggggatggggcgcgctgc

SEQ ID NO: 3959 - DNA, 19 bp, Artificial Sequence
  Description of Artificial Sequence: Synthetic oligonucleotide
ggggatggggcgcgctgct

SEQ ID NO: 3960 - DNA, 19 bp, Artificial Sequence
  Description of Artificial Sequence: Synthetic oligonucleotide
gggatggggcgcgctgctg

SEQ ID NO: 3961 - DNA, 19 bp, Artificial Sequence
  Description of Artificial Sequence: Synthetic oligonucleotide
ggatggggcgcgctgctgc

SEQ ID NO: 3962 - DNA, 19 bp, Artificial Sequence
  Description of Artificial Sequence: Synthetic oligonucleotide
gatggggcgcgctgctgcc

SEQ ID NO: 3963 - DNA, 19 bp, Artificial Sequence
  Description of Artificial Sequence: Synthetic oligonucleotide
atggggcgcgctgctgcct

SEQ ID NO: 3964 - DNA, 19 bp, Artificial Sequence
  Description of Artificial Sequence: Synthetic oligonucleotide
tggggcgcgctgctgcctg

SEQ ID NO: 3965 - DNA, 19 bp, Artificial Sequence
  Description of Artificial Sequence: Synthetic oligonucleotide
ggggcgcgctgctgcctga

SEQ ID NO: 3966 - DNA, 19 bp, Artificial Sequence
  Description of Artificial Sequence: Synthetic oligonucleotide
gggcgcgctgctgcctgag

SEQ ID NO: 3967 - DNA, 19 bp, Artificial Sequence
  Description of Artificial Sequence: Synthetic oligonucleotide
ggcgcgctgctgcctgagg

SEQ ID NO: 3968 - DNA, 19 bp, Artificial Sequence
  Description of Artificial Sequence: Synthetic oligonucleotide
gcgcgctgctgcctgaggc

SEQ ID NO: 3969 - DNA, 19 bp, Artificial Sequence
  Description of Artificial Sequence: Synthetic oligonucleotide
cgcgctgctgcctgaggcc

SEQ ID NO: 3970 - DNA, 19 bp, Artificial Sequence
  Description of Artificial Sequence: Synthetic oligonucleotide
gcgctgctgcctgaggccc

SEQ ID NO: 3971 - DNA, 19 bp, Artificial Sequence
  Description of Artificial Sequence: Synthetic oligonucleotide
cgctgctgcctgaggcccg

SEQ ID NO: 3972 - DNA, 19 bp, Artificial Sequence
  Description of Artificial Sequence: Synthetic oligonucleotide
gctgctgcctgaggcccgg

SEQ ID NO: 3973 - DNA, 19 bp, Artificial Sequence
  Description of Artificial Sequence: Synthetic oligonucleotide
ctgctgcctgaggcccggc

SEQ ID NO: 3974 - DNA, 19 bp, Artificial Sequence
  Description of Artificial Sequence: Synthetic oligonucleotide
tgctgcctgaggcccggcc

SEQ ID NO: 3975 - DNA, 19 bp, Artificial Sequence
  Description of Artificial Sequence: Synthetic oligonucleotide
gctgcctgaggcccggcct

SEQ ID NO: 3976 - DNA, 19 bp, Artificial Sequence
  Description of Artificial Sequence: Synthetic oligonucleotide
ctgcctgaggcccggcctg

SEQ ID NO: 3977 - DNA, 19 bp, Artificial Sequence
  Description of Artificial Sequence: Synthetic oligonucleotide
tgcctgaggcccggcctgg

SEQ ID NO: 3978 - DNA, 19 bp, Artificial Sequence
  Description of Artificial Sequence: Synthetic oligonucleotide
gcctgaggcccggcctggc

SEQ ID NO: 3979 - DNA, 19 bp, Artificial Sequence
  Description of Artificial Sequence: Synthetic oligonucleotide
cctgaggcccggcctggcg

SEQ ID NO: 3980 - DNA, 19 bp, Artificial Sequence
  Description of Artificial Sequence: Synthetic oligonucleotide
ctgaggcccggcctggcgg

SEQ ID NO: 3981 - DNA, 19 bp, Artificial Sequence
  Description of Artificial Sequence: Synthetic oligonucleotide
tgaggcccggcctggcggg

SEQ ID NO: 3982 - DNA, 19 bp, Artificial Sequence
  Description of Artificial Sequence: Synthetic oligonucleotide
gaggcccggcctggcgggc

SEQ ID NO: 3983 - DNA, 19 bp, Artificial Sequence
  Description of Artificial Sequence: Synthetic oligonucleotide
aggcccggcctggcgggcg

SEQ ID NO: 3984 - DNA, 19 bp, Artificial Sequence
  Description of Artificial Sequence: Synthetic oligonucleotide
ggcccggcctggcgggcgc

SEQ ID NO: 3985 - DNA, 19 bp, Artificial Sequence
  Description of Artificial Sequence: Synthetic oligonucleotide
gcccggcctggcgggcgcc

SEQ ID NO: 3986 - DNA, 19 bp, Artificial Sequence
  Description of Artificial Sequence: Synthetic oligonucleotide
cccggcctggcgggcgccc

SEQ ID NO: 3987 - DNA, 19 bp, Artificial Sequence
  Description of Artificial Sequence: Synthetic oligonucleotide
ccggcctggcgggcgcccg

SEQ ID NO: 3988 - DNA, 19 bp, Artificial Sequence
  Description of Artificial Sequence: Synthetic oligonucleotide
cggcctggcgggcgcccgc

SEQ ID NO: 3989 - DNA, 19 bp, Artificial Sequence
  Description of Artificial Sequence: Synthetic oligonucleotide
ggcctggcgggcgcccgcc

SEQ ID NO: 3990 - DNA, 19 bp, Artificial Sequence
  Description of Artificial Sequence: Synthetic oligonucleotide
gcctggcgggcgcccgccg

SEQ ID NO: 3991 - DNA, 19 bp, Artificial Sequence
  Description of Artificial Sequence: Synthetic oligonucleotide
cctggcgggcgcccgccgg

SEQ ID NO: 3992 - DNA, 19 bp, Artificial Sequence
  Description of Artificial Sequence: Synthetic oligonucleotide
ctggcgggcgcccgccggg

SEQ ID NO: 3993 - DNA, 19 bp, Artificial Sequence
  Description of Artificial Sequence: Synthetic oligonucleotide
tggcgggcgcccgccgggg

SEQ ID NO: 3994 - DNA, 19 bp, Artificial Sequence
  Description of Artificial Sequence: Synthetic oligonucleotide
ggcgggcgcccgccggggg

SEQ ID NO: 3995 - DNA, 19 bp, Artificial Sequence
  Description of Artificial Sequence: Synthetic oligonucleotide
gcgggcgcccgccgggggc

SEQ ID NO: 3996 - DNA, 19 bp, Artificial Sequence
  Description of Artificial Sequence: Synthetic oligonucleotide
cgggcgcccgccgggggct

SEQ ID NO: 3997 - DNA, 19 bp, Artificial Sequence
  Description of Artificial Sequence: Synthetic oligonucleotide
gggcgcccgccgggggctg

SEQ ID NO: 3998 - DNA, 19 bp, Artificial Sequence
  Description of Artificial Sequence: Synthetic oligonucleotide
ggcgcccgccgggggctgc

SEQ ID NO: 3999 - DNA, 19 bp, Artificial Sequence
  Description of Artificial Sequence: Synthetic oligonucleotide
gcgcccgccgggggctgcg

SEQ ID NO: 4000 - DNA, 19 bp, Artificial Sequence
  Description of Artificial Sequence: Synthetic oligonucleotide
cgcccgccgggggctgcgg

SEQ ID NO: 4001 - DNA, 19 bp, Artificial Sequence
  Description of Artificial Sequence: Synthetic oligonucleotide
gcccgccgggggctgcggc

SEQ ID NO: 4002 - DNA, 19 bp, Artificial Sequence
  Description of Artificial Sequence: Synthetic oligonucleotide
cccgccgggggctgcggct

SEQ ID NO: 4003 - DNA, 19 bp, Artificial Sequence
  Description of Artificial Sequence: Synthetic oligonucleotide
ccgccgggggctgcggctg

SEQ ID NO: 4004 - DNA, 19 bp, Artificial Sequence
  Description of Artificial Sequence: Synthetic oligonucleotide
cgccgggggctgcggctga

SEQ ID NO: 4005 - DNA, 19 bp, Artificial Sequence
  Description of Artificial Sequence: Synthetic oligonucleotide
gccgggggctgcggctgag

SEQ ID NO: 4006 - DNA, 19 bp, Artificial Sequence
  Description of Artificial Sequence: Synthetic oligonucleotide
ccgggggctgcggctgagg

SEQ ID NO: 4007 - DNA, 19 bp, Artificial Sequence
  Description of Artificial Sequence: Synthetic oligonucleotide
cgggggctgcggctgagga

SEQ ID NO: 4008 - DNA, 19 bp, Artificial Sequence
  Description of Artificial Sequence: Synthetic oligonucleotide
gggggctgcggctgaggag

SEQ ID NO: 4009 - DNA, 19 bp, Artificial Sequence
  Description of Artificial Sequence: Synthetic oligonucleotide
ggggctgcggctgaggagc

SEQ ID NO: 4010 - DNA, 19 bp, Artificial Sequence
  Description of Artificial Sequence: Synthetic oligonucleotide
gggctgcggctgaggagcc

SEQ ID NO: 4011 - DNA, 19 bp, Artificial Sequence
  Description of Artificial Sequence: Synthetic oligonucleotide
ggctgcggctgaggagccg

SEQ ID NO: 4012 - DNA, 19 bp, Artificial Sequence
  Description of Artificial Sequence: Synthetic oligonucleotide
gctgcggctgaggagccga

SEQ ID NO: 4013 - DNA, 19 bp, Artificial Sequence
  Description of Artificial Sequence: Synthetic oligonucleotide
ctgcggctgaggagccgag

SEQ ID NO: 4014 - DNA, 19 bp, Artificial Sequence
  Description of Artificial Sequence: Synthetic oligonucleotide
tgcggctgaggagccgagg

SEQ ID NO: 4015 - DNA, 19 bp, Artificial Sequence
  Description of Artificial Sequence: Synthetic oligonucleotide
gcggctgaggagccgaggg

SEQ ID NO: 4016 - DNA, 19 bp, Artificial Sequence
  Description of Artificial Sequence: Synthetic oligonucleotide
cggctgaggagccgagggc

SEQ ID NO: 4017 - DNA, 19 bp, Artificial Sequence
  Description of Artificial Sequence: Synthetic oligonucleotide
ggctgaggagccgagggcg

SEQ ID NO: 4018 - DNA, 19 bp, Artificial Sequence
  Description of Artificial Sequence: Synthetic oligonucleotide
gctgaggagccgagggcgc

SEQ ID NO: 4019 - DNA, 19 bp, Artificial Sequence
  Description of Artificial Sequence: Synthetic oligonucleotide
ctgaggagccgagggcgcc

SEQ ID NO: 4020 - DNA, 19 bp, Artificial Sequence
  Description of Artificial Sequence: Synthetic oligonucleotide
tgaggagccgagggcgccc

SEQ ID NO: 4021 - DNA, 19 bp, Artificial Sequence
  Description of Artificial Sequence: Synthetic oligonucleotide
gaggagccgagggcgccct

SEQ ID NO: 4022 - DNA, 19 bp, Artificial Sequence
  Description of Artificial Sequence: Synthetic oligonucleotide
aggagccgagggcgccctg

SEQ ID NO: 4023 - DNA, 19 bp, Artificial Sequence
  Description of Artificial Sequence: Synthetic oligonucleotide
ggagccgagggcgccctgt

SEQ ID NO: 4024 - DNA, 19 bp, Artificial Sequence
  Description of Artificial Sequence: Synthetic oligonucleotide
gagccgagggcgccctgta

SEQ ID NO: 4025 - DNA, 19 bp, Artificial Sequence
  Description of Artificial Sequence: Synthetic oligonucleotide
agccgagggcgccctgtac

SEQ ID NO: 4026 - DNA, 19 bp, Artificial Sequence
  Description of Artificial Sequence: Synthetic oligonucleotide
gccgagggcgccctgtacc

SEQ ID NO: 4027 - DNA, 19 bp, Artificial Sequence
  Description of Artificial Sequence: Synthetic oligonucleotide
ccgagggcgccctgtaccg

SEQ ID NO: 4028 - DNA, 19 bp, Artificial Sequence
  Description of Artificial Sequence: Synthetic oligonucleotide
cgagggcgccctgtaccgg

SEQ ID NO: 4029 - DNA, 19 bp, Artificial Sequence
  Description of Artificial Sequence: Synthetic oligonucleotide
gagggcgccctgtaccgga

SEQ ID NO: 4030 - DNA, 19 bp, Artificial Sequence
  Description of Artificial Sequence: Synthetic oligonucleotide
agggcgccctgtaccggag

SEQ ID NO: 4031 - DNA, 19 bp, Artificial Sequence
  Description of Artificial Sequence: Synthetic oligonucleotide
gggcgccctgtaccggagt

SEQ ID NO: 4032 - DNA, 19 bp, Artificial Sequence
  Description of Artificial Sequence: Synthetic oligonucleotide
ggcgccctgtaccggagtg

SEQ ID NO: 4033 - DNA, 19 bp, Artificial Sequence
  Description of Artificial Sequence: Synthetic oligonucleotide
gcgccctgtaccggagtgg

SEQ ID NO: 4034 - DNA, 19 bp, Artificial Sequence
  Description of Artificial Sequence: Synthetic oligonucleotide
cgccctgtaccggagtggc

SEQ ID NO: 4035 - DNA, 19 bp, Artificial Sequence
  Description of Artificial Sequence: Synthetic oligonucleotide
gccctgtaccggagtggcc

SEQ ID NO: 4036 - DNA, 19 bp, Artificial Sequence
  Description of Artificial Sequence: Synthetic oligonucleotide
ccctgtaccggagtggccc

SEQ ID NO: 4037 - DNA, 19 bp, Artificial Sequence
  Description of Artificial Sequence: Synthetic oligonucleotide
cctgtaccggagtggcccg

SEQ ID NO: 4038 - DNA, 19 bp, Artificial Sequence
  Description of Artificial Sequence: Synthetic oligonucleotide
ctgtaccggagtggcccgc

SEQ ID NO: 4039 - DNA, 19 bp, Artificial Sequence
  Description of Artificial Sequence: Synthetic oligonucleotide
tgtaccggagtggcccgcg

SEQ ID NO: 4040 - DNA, 19 bp, Artificial Sequence
  Description of Artificial Sequence: Synthetic oligonucleotide
gtaccggagtggcccgcgc

SEQ ID NO: 4041 - DNA, 19 bp, Artificial Sequence
  Description of Artificial Sequence: Synthetic oligonucleotide
taccggagtggcccgcgcg

SEQ ID NO: 4042 - DNA, 19 bp, Artificial Sequence
  Description of Artificial Sequence: Synthetic oligonucleotide
accggagtggcccgcgcgc

SEQ ID NO: 4043 - DNA, 19 bp, Artificial Sequence
  Description of Artificial Sequence: Synthetic oligonucleotide
ccggagtggcccgcgcgcg

SEQ ID NO: 4044 - DNA, 19 bp, Artificial Sequence
  Description of Artificial Sequence: Synthetic oligonucleotide
cggagtggcccgcgcgcgc

SEQ ID NO: 4045 - DNA, 19 bp, Artificial Sequence
  Description of Artificial Sequence: Synthetic oligonucleotide
ggagtggcccgcgcgcgcg

SEQ ID NO: 4046 - DNA, 19 bp, Artificial Sequence
  Description of Artificial Sequence: Synthetic oligonucleotide
gagtggcccgcgcgcgcgc

SEQ ID NO: 4047 - DNA, 19 bp, Artificial Sequence
  Description of Artificial Sequence: Synthetic oligonucleotide
agtggcccgcgcgcgcgct

SEQ ID NO: 4048 - DNA, 19 bp, Artificial Sequence
  Description of Artificial Sequence: Synthetic oligonucleotide
gtggcccgcgcgcgcgctc

SEQ ID NO: 4049 - DNA, 19 bp, Artificial Sequence
  Description of Artificial Sequence: Synthetic oligonucleotide
tggcccgcgcgcgcgctcg

SEQ ID NO: 4050 - DNA, 19 bp, Artificial Sequence
  Description of Artificial Sequence: Synthetic oligonucleotide
ggcccgcgcgcgcgctcgg

SEQ ID NO: 4051 - DNA, 19 bp, Artificial Sequence
  Description of Artificial Sequence: Synthetic oligonucleotide
gcccgcgcgcgcgctcgga

SEQ ID NO: 4052 - DNA, 19 bp, Artificial Sequence
  Description of Artificial Sequence: Synthetic oligonucleotide
cccgcgcgcgcgctcggag

SEQ ID NO: 4053 - DNA, 19 bp, Artificial Sequence
  Description of Artificial Sequence: Synthetic oligonucleotide
ccgcgcgcgcgctcggagg

SEQ ID NO: 4054 - DNA, 19 bp, Artificial Sequence
  Description of Artificial Sequence: Synthetic oligonucleotide
cgcgcgcgcgctcggaggg

SEQ ID NO: 4055 - DNA, 19 bp, Artificial Sequence
  Description of Artificial Sequence: Synthetic oligonucleotide
gcgcgcgcgctcggagggg

SEQ ID NO: 4056 - DNA, 19 bp, Artificial Sequence
  Description of Artificial Sequence: Synthetic oligonucleotide
cgcgcgcgctcggaggggg

SEQ ID NO: 4057 - DNA, 19 bp, Artificial Sequence
  Description of Artificial Sequence: Synthetic oligonucleotide
gcgcgcgctcggaggggga

SEQ ID NO: 4058 - DNA, 19 bp, Artificial Sequence
  Description of Artificial Sequence: Synthetic oligonucleotide
cgcgcgctcggagggggac

SEQ ID NO: 4059 - DNA, 19 bp, Artificial Sequence
  Description of Artificial Sequence: Synthetic oligonucleotide
gcgcgctcggagggggaca

SEQ ID NO: 4060 - DNA, 19 bp, Artificial Sequence
  Description of Artificial Sequence: Synthetic oligonucleotide
cgcgctcggagggggacag

SEQ ID NO: 4061 - DNA, 19 bp, Artificial Sequence
  Description of Artificial Sequence: Synthetic oligonucleotide
gcgctcggagggggacaga

SEQ ID NO: 4062 - DNA, 19 bp, Artificial Sequence
  Description of Artificial Sequence: Synthetic oligonucleotide
cgctcggagggggacagag

SEQ ID NO: 4063 - DNA, 19 bp, Artificial Sequence
  Description of Artificial Sequence: Synthetic oligonucleotide
gctcggagggggacagaga

SEQ ID NO: 4064 - DNA, 19 bp, Artificial Sequence
  Description of Artificial Sequence: Synthetic oligonucleotide
ctcggagggggacagagac

SEQ ID NO: 4065 - DNA, 19 bp, Artificial Sequence
  Description of Artificial Sequence: Synthetic oligonucleotide
tcggagggggacagagacg

SEQ ID NO: 4066 - DNA, 19 bp, Artificial Sequence
  Description of Artificial Sequence: Synthetic oligonucleotide
cggagggggacagagacgg

SEQ ID NO: 4067 - DNA, 19 bp, Artificial Sequence
  Description of Artificial Sequence: Synthetic oligonucleotide
ggagggggacagagacgga

SEQ ID NO: 4068 - DNA, 19 bp, Artificial Sequence
  Description of Artificial Sequence: Synthetic oligonucleotide
gagggggacagagacggac

SEQ ID NO: 4069 - DNA, 19 bp, Artificial Sequence
  Description of Artificial Sequence: Synthetic oligonucleotide
agggggacagagacggact

SEQ ID NO: 4070 - DNA, 19 bp, Artificial Sequence
  Description of Artificial Sequence: Synthetic oligonucleotide
gggggacagagacggacta

SEQ ID NO: 4071 - DNA, 19 bp, Artificial Sequence
  Description of Artificial Sequence: Synthetic oligonucleotide
ggggacagagacggactac

SEQ ID NO: 4072 - DNA, 19 bp, Artificial Sequence
  Description of Artificial Sequence: Synthetic oligonucleotide
gggacagagacggactaca

SEQ ID NO: 4073 - DNA, 19 bp, Artificial Sequence
  Description of Artificial Sequence: Synthetic oligonucleotide
ggacagagacggactacag

SEQ ID NO: 4074 - DNA, 19 bp, Artificial Sequence
  Description of Artificial Sequence: Synthetic oligonucleotide
gacagagacggactacagc

SEQ ID NO: 4075 - DNA, 19 bp, Artificial Sequence
  Description of Artificial Sequence: Synthetic oligonucleotide
acagagacggactacagcg

SEQ ID NO: 4076 - DNA, 19 bp, Artificial Sequence
  Description of Artificial Sequence: Synthetic oligonucleotide
cagagacggactacagcga

SEQ ID NO: 4077 - DNA, 19 bp, Artificial Sequence
  Description of Artificial Sequence: Synthetic oligonucleotide
agagacggactacagcgag

SEQ ID NO: 4078 - DNA, 19 bp, Artificial Sequence
  Description of Artificial Sequence: Synthetic oligonucleotide
gagacggactacagcgagg

SEQ ID NO: 4079 - DNA, 19 bp, Artificial Sequence
  Description of Artificial Sequence: Synthetic oligonucleotide
agacggactacagcgaggc

SEQ ID NO: 4080 - DNA, 19 bp, Artificial Sequence
  Description of Artificial Sequence: Synthetic oligonucleotide
gacggactacagcgaggcc

SEQ ID NO: 4081 - DNA, 19 bp, Artificial Sequence
  Description of Artificial Sequence: Synthetic oligonucleotide
acggactacagcgaggccc

SEQ ID NO: 4082 - DNA, 19 bp, Artificial Sequence
  Description of Artificial Sequence: Synthetic oligonucleotide
cggactacagcgaggcccg

SEQ ID NO: 4083 - DNA, 19 bp, Artificial Sequence
  Description of Artificial Sequence: Synthetic oligonucleotide
ggactacagcgaggcccgg

SEQ ID NO: 4084 - DNA, 19 bp, Artificial Sequence
  Description of Artificial Sequence: Synthetic oligonucleotide
gactacagcgaggcccgga

SEQ ID NO: 4085 - DNA, 19 bp, Artificial Sequence
  Description of Artificial Sequence: Synthetic oligonucleotide
actacagcgaggcccggag

SEQ ID NO: 4086 - DNA, 19 bp, Artificial Sequence
  Description of Artificial Sequence: Synthetic oligonucleotide
ctacagcgaggcccggagg

SEQ ID NO: 4087 - DNA, 19 bp, Artificial Sequence
  Description of Artificial Sequence: Synthetic oligonucleotide
tacagcgaggcccggagga

SEQ ID NO: 4088 - DNA, 19 bp, Artificial Sequence
  Description of Artificial Sequence: Synthetic oligonucleotide
acagcgaggcccggaggag

SEQ ID NO: 4089 - DNA, 19 bp, Artificial Sequence
  Description of Artificial Sequence: Synthetic oligonucleotide
cagcgaggcccggaggagc

SEQ ID NO: 4090 - DNA, 19 bp, Artificial Sequence
  Description of Artificial Sequence: Synthetic oligonucleotide
agcgaggcccggaggagcc

SEQ ID NO: 4091 - DNA, 19 bp, Artificial Sequence
  Description of Artificial Sequence: Synthetic oligonucleotide
gcgaggcccggaggagccc

SEQ ID NO: 4092 - DNA, 19 bp, Artificial Sequence
  Description of Artificial Sequence: Synthetic oligonucleotide
cgaggcccggaggagcccc

SEQ ID NO: 4093 - DNA, 19 bp, Artificial Sequence
  Description of Artificial Sequence: Synthetic oligonucleotide
gaggcccggaggagccccg

SEQ ID NO: 4094 - DNA, 19 bp, Artificial Sequence
  Description of Artificial Sequence: Synthetic oligonucleotide
aggcccggaggagccccga

SEQ ID NO: 4095 - DNA, 19 bp, Artificial Sequence
  Description of Artificial Sequence: Synthetic oligonucleotide
ggcccggaggagccccgag

SEQ ID NO: 4096 - DNA, 19 bp, Artificial Sequence
  Description of Artificial Sequence: Synthetic oligonucleotide
gcccggaggagccccgaga

SEQ ID NO: 4097 - DNA, 19 bp, Artificial Sequence
  Description of Artificial Sequence: Synthetic oligonucleotide
cccggaggagccccgagat

SEQ ID NO: 4098 - DNA, 19 bp, Artificial Sequence
  Description of Artificial Sequence: Synthetic oligonucleotide
ccggaggagccccgagatg

SEQ ID NO: 4099 - DNA, 19 bp, Artificial Sequence
  Description of Artificial Sequence: Synthetic oligonucleotide
cggaggagccccgagatgt

SEQ ID NO: 4100 - DNA, 19 bp, Artificial Sequence
  Description of Artificial Sequence: Synthetic oligonucleotide
ggaggagccccgagatgtc

SEQ ID NO: 4101 - DNA, 19 bp, Artificial Sequence
  Description of Artificial Sequence: Synthetic oligonucleotide
gaggagccccgagatgtcc

SEQ ID NO: 4102 - DNA, 19 bp, Artificial Sequence
  Description of Artificial Sequence: Synthetic oligonucleotide
aggagccccgagatgtccc

SEQ ID NO: 4103 - DNA, 19 bp, Artificial Sequence
  Description of Artificial Sequence: Synthetic oligonucleotide
ggagccccgagatgtcccg

SEQ ID NO: 4104 - DNA, 19 bp, Artificial Sequence
  Description of Artificial Sequence: Synthetic oligonucleotide
gagccccgagatgtcccgt

SEQ ID NO: 4105 - DNA, 19 bp, Artificial Sequence
  Description of Artificial Sequence: Synthetic oligonucleotide
agccccgagatgtcccgtg

SEQ ID NO: 4106 - DNA, 19 bp, Artificial Sequence
  Description of Artificial Sequence: Synthetic oligonucleotide
gccccgagatgtcccgtgt

SEQ ID NO: 4107 - DNA, 19 bp, Artificial Sequence
  Description of Artificial Sequence: Synthetic oligonucleotide
ccccgagatgtcccgtgtg

SEQ ID NO: 4108 - DNA, 19 bp, Artificial Sequence
  Description of Artificial Sequence: Synthetic oligonucleotide
cccgagatgtcccgtgtgc

SEQ ID NO: 4109 - DNA, 19 bp, Artificial Sequence
  Description of Artificial Sequence: Synthetic oligonucleotide
ccgagatgtcccgtgtgcg

SEQ ID NO: 4110 - DNA, 19 bp, Artificial Sequence
  Description of Artificial Sequence: Synthetic oligonucleotide
cgagatgtcccgtgtgcgc

SEQ ID NO: 4111 - DNA, 19 bp, Artificial Sequence
  Description of Artificial Sequence: Synthetic oligonucleotide
gagatgtcccgtgtgcgcc

SEQ ID NO: 4112 - DNA, 19 bp, Artificial Sequence
  Description of Artificial Sequence: Synthetic oligonucleotide
agatgtcccgtgtgcgccg

SEQ ID NO: 4113 - DNA, 19 bp, Artificial Sequence
  Description of Artificial Sequence: Synthetic oligonucleotide
gatgtcccgtgtgcgccgc

SEQ ID NO: 4114 - DNA, 19 bp, Artificial Sequence
  Description of Artificial Sequence: Synthetic oligonucleotide
atgtcccgtgtgcgccgcc

SEQ ID NO: 4115 - DNA, 19 bp, Artificial Sequence
  Description of Artificial Sequence: Synthetic oligonucleotide
tgtcccgtgtgcgccgcct

SEQ ID NO: 4116 - DNA, 19 bp, Artificial Sequence
  Description of Artificial Sequence: Synthetic oligonucleotide
gtcccgtgtgcgccgcctt

SEQ ID NO: 4117 - DNA, 19 bp, Artificial Sequence
  Description of Artificial Sequence: Synthetic oligonucleotide
tcccgtgtgcgccgccttc

SEQ ID NO: 4118 - DNA, 19 bp, Artificial Sequence
  Description of Artificial Sequence: Synthetic oligonucleotide
cccgtgtgcgccgccttct

SEQ ID NO: 4119 - DNA, 19 bp, Artificial Sequence
  Description of Artificial Sequence: Synthetic oligonucleotide
ccgtgtgcgccgccttctg

SEQ ID NO: 4120 - DNA, 19 bp, Artificial Sequence
  Description of Artificial Sequence: Synthetic oligonucleotide
cgtgtgcgccgccttctgc

SEQ ID NO: 4121 - DNA, 19 bp, Artificial Sequence
  Description of Artificial Sequence: Synthetic oligonucleotide
gtgtgcgccgccttctgct

SEQ ID NO: 4122 - DNA, 19 bp, Artificial Sequence
  Description of Artificial Sequence: Synthetic oligonucleotide
tgtgcgccgccttctgctt

SEQ ID NO: 4123 - DNA, 19 bp, Artificial Sequence
  Description of Artificial Sequence: Synthetic oligonucleotide
gtgcgccgccttctgcttg

SEQ ID NO: 4124 - DNA, 19 bp, Artificial Sequence
  Description of Artificial Sequence: Synthetic oligonucleotide
tgcgccgccttctgcttgg

SEQ ID NO: 4125 - DNA, 19 bp, Artificial Sequence
  Description of Artificial Sequence: Synthetic oligonucleotide
gcgccgccttctgcttgga

SEQ ID NO: 4126 - DNA, 19 bp, Artificial Sequence
  Description of Artificial Sequence: Synthetic oligonucleotide
cgccgccttctgcttggat

SEQ ID NO: 4127 - DNA, 19 bp, Artificial Sequence
  Description of Artificial Sequence: Synthetic oligonucleotide
gccgccttctgcttggata

SEQ ID NO: 4128 - DNA, 19 bp, Artificial Sequence
  Description of Artificial Sequence: Synthetic oligonucleotide
ccgccttctgcttggatac

SEQ ID NO: 4129 - DNA, 19 bp, Artificial Sequence
  Description of Artificial Sequence: Synthetic oligonucleotide
cgccttctgcttggatacc

SEQ ID NO: 4130 - DNA, 19 bp, Artificial Sequence
  Description of Artificial Sequence: Synthetic oligonucleotide
gccttctgcttggatacct

SEQ ID NO: 4131 - DNA, 19 bp, Artificial Sequence
  Description of Artificial Sequence: Synthetic oligonucleotide
ccttctgcttggatacctg

SEQ ID NO: 4132 - DNA, 19 bp, Artificial Sequence
  Description of Artificial Sequence: Synthetic oligonucleotide
cttctgcttggatacctgt

SEQ ID NO: 4133 - DNA, 19 bp, Artificial Sequence
  Description of Artificial Sequence: Synthetic oligonucleotide
ttctgcttggatacctgtt

SEQ ID NO: 4134 - DNA, 19 bp, Artificial Sequence
  Description of Artificial Sequence: Synthetic oligonucleotide
tctgcttggatacctgttc

SEQ ID NO: 4135 - DNA, 19 bp, Artificial Sequence
  Description of Artificial Sequence: Synthetic oligonucleotide
ctgcttggatacctgttcc

SEQ ID NO: 4136 - DNA, 19 bp, Artificial Sequence
  Description of Artificial Sequence: Synthetic oligonucleotide
tgcttggatacctgttccc

SEQ ID NO: 4137 - DNA, 19 bp, Artificial Sequence
  Description of Artificial Sequence: Synthetic oligonucleotide
gcttggatacctgttccca

SEQ ID NO: 4138 - DNA, 19 bp, Artificial Sequence
  Description of Artificial Sequence: Synthetic oligonucleotide
cttggatacctgttcccag

SEQ ID NO: 4139 - DNA, 19 bp, Artificial Sequence
  Description of Artificial Sequence: Synthetic oligonucleotide
ttggatacctgttcccagc

SEQ ID NO: 4140 - DNA, 19 bp, Artificial Sequence
  Description of Artificial Sequence: Synthetic oligonucleotide
tggatacctgttcccagcc

SEQ ID NO: 4141 - DNA, 19 bp, Artificial Sequence
  Description of Artificial Sequence: Synthetic oligonucleotide
ggatacctgttcccagccc

SEQ ID NO: 4142 - DNA, 19 bp, Artificial Sequence
  Description of Artificial Sequence: Synthetic oligonucleotide
gatacctgttcccagccct

SEQ ID NO: 4143 - DNA, 19 bp, Artificial Sequence
  Description of Artificial Sequence: Synthetic oligonucleotide
atacctgttcccagccctc

SEQ ID NO: 4144 - DNA, 19 bp, Artificial Sequence
  Description of Artificial Sequence: Synthetic oligonucleotide
tacctgttcccagccctcc

SEQ ID NO: 4145 - DNA, 19 bp, Artificial Sequence
  Description of Artificial Sequence: Synthetic oligonucleotide
acctgttcccagccctcct

SEQ ID NO: 4146 - DNA, 19 bp, Artificial Sequence
  Description of Artificial Sequence: Synthetic oligonucleotide
cctgttcccagccctcctg

SEQ ID NO: 4147 - DNA, 19 bp, Artificial Sequence
  Description of Artificial Sequence: Synthetic oligonucleotide
ctgttcccagccctcctgt

SEQ ID NO: 4148 - DNA, 19 bp, Artificial Sequence
  Description of Artificial Sequence: Synthetic oligonucleotide
tgttcccagccctcctgtt

SEQ ID NO: 4149 - DNA, 19 bp, Artificial Sequence
  Description of Artificial Sequence: Synthetic oligonucleotide
gttcccagccctcctgttg

SEQ ID NO: 4150 - DNA, 19 bp, Artificial Sequence
  Description of Artificial Sequence: Synthetic oligonucleotide
ttcccagccctcctgttgc

SEQ ID NO: 4151 - DNA, 19 bp, Artificial Sequence
  Description of Artificial Sequence: Synthetic oligonucleotide
tcccagccctcctgttgca

SEQ ID NO: 4152 - DNA, 19 bp, Artificial Sequence
  Description of Artificial Sequence: Synthetic oligonucleotide
cccagccctcctgttgcat

SEQ ID NO: 4153 - DNA, 19 bp, Artificial Sequence
  Description of Artificial Sequence: Synthetic oligonucleotide
ccagccctcctgttgcatg

SEQ ID NO: 4154 - DNA, 19 bp, Artificial Sequence
  Description of Artificial Sequence: Synthetic oligonucleotide
cagccctcctgttgcatgg

SEQ ID NO: 4155 - DNA, 19 bp, Artificial Sequence
  Description of Artificial Sequence: Synthetic oligonucleotide
agccctcctgttgcatggg

SEQ ID NO: 4156 - DNA, 19 bp, Artificial Sequence
  Description of Artificial Sequence: Synthetic oligonucleotide
gccctcctgttgcatgggc

SEQ ID NO: 4157 - DNA, 19 bp, Artificial Sequence
  Description of Artificial Sequence: Synthetic oligonucleotide
ccctcctgttgcatgggct

SEQ ID NO: 4158 - DNA, 19 bp, Artificial Sequence
  Description of Artificial Sequence: Synthetic oligonucleotide
cctcctgttgcatgggctg

SEQ ID NO: 4159 - DNA, 19 bp, Artificial Sequence
  Description of Artificial Sequence: Synthetic oligonucleotide
ctcctgttgcatgggctgg

SEQ ID NO: 4160 - DNA, 19 bp, Artificial Sequence
  Description of Artificial Sequence: Synthetic oligonucleotide
tcctgttgcatgggctggg

SEQ ID NO: 4161 - DNA, 19 bp, Artificial Sequence
  Description of Artificial Sequence: Synthetic oligonucleotide
cctgttgcatgggctggga

SEQ ID NO: 4162 - DNA, 19 bp, Artificial Sequence
  Description of Artificial Sequence: Synthetic oligonucleotide
ctgttgcatgggctgggag

SEQ ID NO: 4163 - DNA, 19 bp, Artificial Sequence
  Description of Artificial Sequence: Synthetic oligonucleotide
tgttgcatgggctgggaga

SEQ ID NO: 4164 - DNA, 19 bp, Artificial Sequence
  Description of Artificial Sequence: Synthetic oligonucleotide
gttgcatgggctgggagag

SEQ ID NO: 4165 - DNA, 19 bp, Artificial Sequence
  Description of Artificial Sequence: Synthetic oligonucleotide
ttgcatgggctgggagagg

SEQ ID NO: 4166 - DNA, 19 bp, Artificial Sequence
  Description of Artificial Sequence: Synthetic oligonucleotide
tgcatgggctgggagaggg

SEQ ID NO: 4167 - DNA, 19 bp, Artificial Sequence
  Description of Artificial Sequence: Synthetic oligonucleotide
gcatgggctgggagagggc

SEQ ID NO: 4168 - DNA, 19 bp, Artificial Sequence
  Description of Artificial Sequence: Synthetic oligonucleotide
catgggctgggagagggct

SEQ ID NO: 4169 - DNA, 19 bp, Artificial Sequence
  Description of Artificial Sequence: Synthetic oligonucleotide
atgggctgggagagggctc

SEQ ID NO: 4170 - DNA, 19 bp, Artificial Sequence
  Description of Artificial Sequence: Synthetic oligonucleotide
tgggctgggagagggctct

SEQ ID NO: 4171 - DNA, 19 bp, Artificial Sequence
  Description of Artificial Sequence: Synthetic oligonucleotide
gggctgggagagggctctg

SEQ ID NO: 4172 - DNA, 19 bp, Artificial Sequence
  Description of Artificial Sequence: Synthetic oligonucleotide
ggctgggagagggctctgc

SEQ ID NO: 4173 - DNA, 19 bp, Artificial Sequence
  Description of Artificial Sequence: Synthetic oligonucleotide
gctgggagagggctctgcc

SEQ ID NO: 4174 - DNA, 19 bp, Artificial Sequence
  Description of Artificial Sequence: Synthetic oligonucleotide
ctgggagagggctctgccc

SEQ ID NO: 4175 - DNA, 19 bp, Artificial Sequence
  Description of Artificial Sequence: Synthetic oligonucleotide
tgggagagggctctgccct

SEQ ID NO: 4176 - DNA, 19 bp, Artificial Sequence
  Description of Artificial Sequence: Synthetic oligonucleotide
gggagagggctctgccctc

SEQ ID NO: 4177 - DNA, 19 bp, Artificial Sequence
  Description of Artificial Sequence: Synthetic oligonucleotide
ggagagggctctgccctcc

SEQ ID NO: 4178 - DNA, 19 bp, Artificial Sequence
  Description of Artificial Sequence: Synthetic oligonucleotide
gagagggctctgccctcct

SEQ ID NO: 4179 - DNA, 19 bp, Artificial Sequence
  Description of Artificial Sequence: Synthetic oligonucleotide
agagggctctgccctcctt

SEQ ID NO: 4180 - DNA, 19 bp, Artificial Sequence
  Description of Artificial Sequence: Synthetic oligonucleotide
gagggctctgccctccttc

SEQ ID NO: 4181 - DNA, 19 bp, Artificial Sequence
  Description of Artificial Sequence: Synthetic oligonucleotide
agggctctgccctccttca

SEQ ID NO: 4182 - DNA, 19 bp, Artificial Sequence
  Description of Artificial Sequence: Synthetic oligonucleotide
gggctctgccctccttcat

SEQ ID NO: 4183 - DNA, 19 bp, Artificial Sequence
  Description of Artificial Sequence: Synthetic oligonucleotide
ggctctgccctccttcatc

SEQ ID NO: 4184 - DNA, 19 bp, Artificial Sequence
  Description of Artificial Sequence: Synthetic oligonucleotide
gctctgccctccttcatcc

SEQ ID NO: 4185 - DNA, 19 bp, Artificial Sequence
  Description of Artificial Sequence: Synthetic oligonucleotide
ctctgccctccttcatcca

SEQ ID NO: 4186 - DNA, 19 bp, Artificial Sequence
  Description of Artificial Sequence: Synthetic oligonucleotide
tctgccctccttcatccag

SEQ ID NO: 4187 - DNA, 19 bp, Artificial Sequence
  Description of Artificial Sequence: Synthetic oligonucleotide
ctgccctccttcatccaga

SEQ ID NO: 4188 - DNA, 19 bp, Artificial Sequence
  Description of Artificial Sequence: Synthetic oligonucleotide
tgccctccttcatccagac

SEQ ID NO: 4189 - DNA, 19 bp, Artificial Sequence
  Description of Artificial Sequence: Synthetic oligonucleotide
gccctccttcatccagaca

SEQ ID NO: 4190 - DNA, 19 bp, Artificial Sequence
  Description of Artificial Sequence: Synthetic oligonucleotide
ccctccttcatccagacag

SEQ ID NO: 4191 - DNA, 19 bp, Artificial Sequence
  Description of Artificial Sequence: Synthetic oligonucleotide
cctccttcatccagacagc

SEQ ID NO: 4192 - DNA, 19 bp, Artificial Sequence
  Description of Artificial Sequence: Synthetic oligonucleotide
ctccttcatccagacagca

SEQ ID NO: 4193 - DNA, 19 bp, Artificial Sequence
  Description of Artificial Sequence: Synthetic oligonucleotide
tccttcatccagacagcag

SEQ ID NO: 4194 - DNA, 19 bp, Artificial Sequence
  Description of Artificial Sequence: Synthetic oligonucleotide
ccttcatccagacagcaga

SEQ ID NO: 4195 - DNA, 19 bp, Artificial Sequence
  Description of Artificial Sequence: Synthetic oligonucleotide
cttcatccagacagcagat

SEQ ID NO: 4196 - DNA, 19 bp, Artificial Sequence
  Description of Artificial Sequence: Synthetic oligonucleotide
ttcatccagacagcagatc

SEQ ID NO: 4197 - DNA, 19 bp, Artificial Sequence
  Description of Artificial Sequence: Synthetic oligonucleotide
tcatccagacagcagatcg

SEQ ID NO: 4198 - DNA, 19 bp, Artificial Sequence
  Description of Artificial Sequence: Synthetic oligonucleotide
catccagacagcagatcgc

SEQ ID NO: 4199 - DNA, 19 bp, Artificial Sequence
  Description of Artificial Sequence: Synthetic oligonucleotide
atccagacagcagatcgca

SEQ ID NO: 4200 - DNA, 19 bp, Artificial Sequence
  Description of Artificial Sequence: Synthetic oligonucleotide
tccagacagcagatcgcac

SEQ ID NO: 4201 - DNA, 19 bp, Artificial Sequence
  Description of Artificial Sequence: Synthetic oligonucleotide
ccagacagcagatcgcacc

SEQ ID NO: 4202 - DNA, 19 bp, Artificial Sequence
  Description of Artificial Sequence: Synthetic oligonucleotide
cagacagcagatcgcaccc

SEQ ID NO: 4203 - DNA, 19 bp, Artificial Sequence
  Description of Artificial Sequence: Synthetic oligonucleotide
agacagcagatcgcaccct

SEQ ID NO: 4204 - DNA, 19 bp, Artificial Sequence
  Description of Artificial Sequence: Synthetic oligonucleotide
gacagcagatcgcaccctc

SEQ ID NO: 4205 - DNA, 19 bp, Artificial Sequence
  Description of Artificial Sequence: Synthetic oligonucleotide
acagcagatcgcaccctcg

SEQ ID NO: 4206 - DNA, 19 bp, Artificial Sequence
  Description of Artificial Sequence: Synthetic oligonucleotide
cagcagatcgcaccctcgg

SEQ ID NO: 4207 - DNA, 19 bp, Artificial Sequence
  Description of Artificial Sequence: Synthetic oligonucleotide
agcagatcgcaccctcggt

SEQ ID NO: 4208 - DNA, 19 bp, Artificial Sequence
  Description of Artificial Sequence: Synthetic oligonucleotide
gcagatcgcaccctcggtc

SEQ ID NO: 4209 - DNA, 19 bp, Artificial Sequence
  Description of Artificial Sequence: Synthetic oligonucleotide
cagatcgcaccctcggtcc

SEQ ID NO: 4210 - DNA, 19 bp, Artificial Sequence
  Description of Artificial Sequence: Synthetic oligonucleotide
agatcgcaccctcggtcct

SEQ ID NO: 4211 - DNA, 19 bp, Artificial Sequence
  Description of Artificial Sequence: Synthetic oligonucleotide
gatcgcaccctcggtcctt

SEQ ID NO: 4212 - DNA, 19 bp, Artificial Sequence
  Description of Artificial Sequence: Synthetic oligonucleotide
atcgcaccctcggtcctta

SEQ ID NO: 4213 - DNA, 19 bp, Artificial Sequence
  Description of Artificial Sequence: Synthetic oligonucleotide
tcgcaccctcggtccttag

SEQ ID NO: 4214 - DNA, 19 bp, Artificial Sequence
  Description of Artificial Sequence: Synthetic oligonucleotide
cgcaccctcggtccttaga

SEQ ID NO: 4215 - DNA, 19 bp, Artificial Sequence
  Description of Artificial Sequence: Synthetic oligonucleotide
gcaccctcggtccttagag

SEQ ID NO: 4216 - DNA, 19 bp, Artificial Sequence
  Description of Artificial Sequence: Synthetic oligonucleotide
caccctcggtccttagaga

SEQ ID NO: 4217 - DNA, 19 bp, Artificial Sequence
  Description of Artificial Sequence: Synthetic oligonucleotide
accctcggtccttagagaa

SEQ ID NO: 4218 - DNA, 19 bp, Artificial Sequence
  Description of Artificial Sequence: Synthetic oligonucleotide
ccctcggtccttagagaaa

SEQ ID NO: 4219 - DNA, 19 bp, Artificial Sequence
  Description of Artificial Sequence: Synthetic oligonucleotide
cctcggtccttagagaaaa

SEQ ID NO: 4220 - DNA, 19 bp, Artificial Sequence
  Description of Artificial Sequence: Synthetic oligonucleotide
ctcggtccttagagaaaag

SEQ ID NO: 4221 - DNA, 19 bp, Artificial Sequence
  Description of Artificial Sequence: Synthetic oligonucleotide
tcggtccttagagaaaagc

SEQ ID NO: 4222 - DNA, 19 bp, Artificial Sequence
  Description of Artificial Sequence: Synthetic oligonucleotide
cggtccttagagaaaagcg

SEQ ID NO: 4223 - DNA, 19 bp, Artificial Sequence
  Description of Artificial Sequence: Synthetic oligonucleotide
ggtccttagagaaaagcgc

SEQ ID NO: 4224 - DNA, 19 bp, Artificial Sequence
  Description of Artificial Sequence: Synthetic oligonucleotide
gtccttagagaaaagcgcc

SEQ ID NO: 4225 - DNA, 19 bp, Artificial Sequence
  Description of Artificial Sequence: Synthetic oligonucleotide
tccttagagaaaagcgcct

SEQ ID NO: 4226 - DNA, 19 bp, Artificial Sequence
  Description of Artificial Sequence: Synthetic oligonucleotide
ccttagagaaaagcgcctg

SEQ ID NO: 4227 - DNA, 19 bp, Artificial Sequence
  Description of Artificial Sequence: Synthetic oligonucleotide
cttagagaaaagcgcctgg

SEQ ID NO: 4228 - DNA, 19 bp, Artificial Sequence
  Description of Artificial Sequence: Synthetic oligonucleotide
ttagagaaaagcgcctgga

SEQ ID NO: 4229 - DNA, 19 bp, Artificial Sequence
  Description of Artificial Sequence: Synthetic oligonucleotide
tagagaaaagcgcctggag

SEQ ID NO: 4230 - DNA, 19 bp, Artificial Sequence
  Description of Artificial Sequence: Synthetic oligonucleotide
agagaaaagcgcctggagg

SEQ ID NO: 4231 - DNA, 19 bp, Artificial Sequence
  Description of Artificial Sequence: Synthetic oligonucleotide
gagaaaagcgcctggaggg

SEQ ID NO: 4232 - DNA, 19 bp, Artificial Sequence
  Description of Artificial Sequence: Synthetic oligonucleotide
agaaaagcgcctggagggc

SEQ ID NO: 4233 - DNA, 19 bp, Artificial Sequence
  Description of Artificial Sequence: Synthetic oligonucleotide
gaaaagcgcctggagggct

SEQ ID NO: 4234 - DNA, 19 bp, Artificial Sequence
  Description of Artificial Sequence: Synthetic oligonucleotide
aaaagcgcctggagggctt

SEQ ID NO: 4235 - DNA, 19 bp, Artificial Sequence
  Description of Artificial Sequence: Synthetic oligonucleotide
aaagcgcctggagggcttt

SEQ ID NO: 4236 - DNA, 19 bp, Artificial Sequence
  Description of Artificial Sequence: Synthetic oligonucleotide
aagcgcctggagggctttc

SEQ ID NO: 4237 - DNA, 19 bp, Artificial Sequence
  Description of Artificial Sequence: Synthetic oligonucleotide
agcgcctggagggctttca

SEQ ID NO: 4238 - DNA, 19 bp, Artificial Sequence
  Description of Artificial Sequence: Synthetic oligonucleotide
gcgcctggagggctttcaa

SEQ ID NO: 4239 - DNA, 19 bp, Artificial Sequence
  Description of Artificial Sequence: Synthetic oligonucleotide
cgcctggagggctttcaag

SEQ ID NO: 4240 - DNA, 19 bp, Artificial Sequence
  Description of Artificial Sequence: Synthetic oligonucleotide
gcctggagggctttcaagg

SEQ ID NO: 4241 - DNA, 19 bp, Artificial Sequence
  Description of Artificial Sequence: Synthetic oligonucleotide
cctggagggctttcaagga

SEQ ID NO: 4242 - DNA, 19 bp, Artificial Sequence
  Description of Artificial Sequence: Synthetic oligonucleotide
ctggagggctttcaaggag

SEQ ID NO: 4243 - DNA, 19 bp, Artificial Sequence
  Description of Artificial Sequence: Synthetic oligonucleotide
tggagggctttcaaggagt

SEQ ID NO: 4244 - DNA, 19 bp, Artificial Sequence
  Description of Artificial Sequence: Synthetic oligonucleotide
ggagggctttcaaggagtc

SEQ ID NO: 4245 - DNA, 19 bp, Artificial Sequence
  Description of Artificial Sequence: Synthetic oligonucleotide
gagggctttcaaggagtca

SEQ ID NO: 4246 - DNA, 19 bp, Artificial Sequence
  Description of Artificial Sequence: Synthetic oligonucleotide
agggctttcaaggagtcac

SEQ ID NO: 4247 - DNA, 19 bp, Artificial Sequence
  Description of Artificial Sequence: Synthetic oligonucleotide
gggctttcaaggagtcaca

SEQ ID NO: 4248 - DNA, 19 bp, Artificial Sequence
  Description of Artificial Sequence: Synthetic oligonucleotide
ggctttcaaggagtcacag

SEQ ID NO: 4249 - DNA, 19 bp, Artificial Sequence
  Description of Artificial Sequence: Synthetic oligonucleotide
gctttcaaggagtcacagt

SEQ ID NO: 4250 - DNA, 19 bp, Artificial Sequence
  Description of Artificial Sequence: Synthetic oligonucleotide
ctttcaaggagtcacagtg

SEQ ID NO: 4251 - DNA, 19 bp, Artificial Sequence
  Description of Artificial Sequence: Synthetic oligonucleotide
tttcaaggagtcacagtgt

SEQ ID NO: 4252 - DNA, 19 bp, Artificial Sequence
  Description of Artificial Sequence: Synthetic oligonucleotide
ttcaaggagtcacagtgtc

SEQ ID NO: 4253 - DNA, 19 bp, Artificial Sequence
  Description of Artificial Sequence: Synthetic oligonucleotide
tcaaggagtcacagtgtca

SEQ ID NO: 4254 - DNA, 19 bp, Artificial Sequence
  Description of Artificial Sequence: Synthetic oligonucleotide
caaggagtcacagtgtcat

SEQ ID NO: 4255 - DNA, 19 bp, Artificial Sequence
  Description of Artificial Sequence: Synthetic oligonucleotide
aaggagtcacagtgtcatc

SEQ ID NO: 4256 - DNA, 19 bp, Artificial Sequence
  Description of Artificial Sequence: Synthetic oligonucleotide
aggagtcacagtgtcatca

SEQ ID NO: 4257 - DNA, 19 bp, Artificial Sequence
  Description of Artificial Sequence: Synthetic oligonucleotide
ggagtcacagtgtcatcac

SEQ ID NO: 4258 - DNA, 19 bp, Artificial Sequence
  Description of Artificial Sequence: Synthetic oligonucleotide
gagtcacagtgtcatcaca

SEQ ID NO: 4259 - DNA, 19 bp, Artificial Sequence
  Description of Artificial Sequence: Synthetic oligonucleotide
agtcacagtgtcatcacat

SEQ ID NO: 4260 - DNA, 19 bp, Artificial Sequence
  Description of Artificial Sequence: Synthetic oligonucleotide
gtcacagtgtcatcacatg

SEQ ID NO: 4261 - DNA, 19 bp, Artificial Sequence
  Description of Artificial Sequence: Synthetic oligonucleotide
tcacagtgtcatcacatgc

SEQ ID NO: 4262 - DNA, 19 bp, Artificial Sequence
  Description of Artificial Sequence: Synthetic oligonucleotide
cacagtgtcatcacatgct

SEQ ID NO: 4263 - DNA, 19 bp, Artificial Sequence
  Description of Artificial Sequence: Synthetic oligonucleotide
acagtgtcatcacatgctg

SEQ ID NO: 4264 - DNA, 19 bp, Artificial Sequence
  Description of Artificial Sequence: Synthetic oligonucleotide
cagtgtcatcacatgctga

SEQ ID NO: 4265 - DNA, 19 bp, Artificial Sequence
  Description of Artificial Sequence: Synthetic oligonucleotide
agtgtcatcacatgctgaa

SEQ ID NO: 4266 - DNA, 19 bp, Artificial Sequence
  Description of Artificial Sequence: Synthetic oligonucleotide
gtgtcatcacatgctgaag

SEQ ID NO: 4267 - DNA, 19 bp, Artificial Sequence
  Description of Artificial Sequence: Synthetic oligonucleotide
tgtcatcacatgctgaagc

SEQ ID NO: 4268 - DNA, 19 bp, Artificial Sequence
  Description of Artificial Sequence: Synthetic oligonucleotide
gtcatcacatgctgaagca

SEQ ID NO: 4269 - DNA, 19 bp, Artificial Sequence
  Description of Artificial Sequence: Synthetic oligonucleotide
tcatcacatgctgaagcat

SEQ ID NO: 4270 - DNA, 19 bp, Artificial Sequence
  Description of Artificial Sequence: Synthetic oligonucleotide
catcacatgctgaagcatc

SEQ ID NO: 4271 - DNA, 19 bp, Artificial Sequence
  Description of Artificial Sequence: Synthetic oligonucleotide
atcacatgctgaagcatct

SEQ ID NO: 4272 - DNA, 19 bp, Artificial Sequence
  Description of Artificial Sequence: Synthetic oligonucleotide
tcacatgctgaagcatctc

SEQ ID NO: 4273 - DNA, 19 bp, Artificial Sequence
  Description of Artificial Sequence: Synthetic oligonucleotide
cacatgctgaagcatctcc

SEQ ID NO: 4274 - DNA, 19 bp, Artificial Sequence
  Description of Artificial Sequence: Synthetic oligonucleotide
acatgctgaagcatctcca

SEQ ID NO: 4275 - DNA, 19 bp, Artificial Sequence
  Description of Artificial Sequence: Synthetic oligonucleotide
catgctgaagcatctccac

SEQ ID NO: 4276 - DNA, 19 bp, Artificial Sequence
  Description of Artificial Sequence: Synthetic oligonucleotide
atgctgaagcatctccaca

SEQ ID NO: 4277 - DNA, 19 bp, Artificial Sequence
  Description of Artificial Sequence: Synthetic oligonucleotide
tgctgaagcatctccacaa

SEQ ID NO: 4278 - DNA, 19 bp, Artificial Sequence
  Description of Artificial Sequence: Synthetic oligonucleotide
gctgaagcatctccacaac

SEQ ID NO: 4279 - DNA, 19 bp, Artificial Sequence
  Description of Artificial Sequence: Synthetic oligonucleotide
ctgaagcatctccacaacg

SEQ ID NO: 4280 - DNA, 19 bp, Artificial Sequence
  Description of Artificial Sequence: Synthetic oligonucleotide
tgaagcatctccacaacgg

SEQ ID NO: 4281 - DNA, 19 bp, Artificial Sequence
  Description of Artificial Sequence: Synthetic oligonucleotide
gaagcatctccacaacggt

SEQ ID NO: 4282 - DNA, 19 bp, Artificial Sequence
  Description of Artificial Sequence: Synthetic oligonucleotide
aagcatctccacaacggtg

SEQ ID NO: 4283 - DNA, 19 bp, Artificial Sequence
  Description of Artificial Sequence: Synthetic oligonucleotide
agcatctccacaacggtgc

SEQ ID NO: 4284 - DNA, 19 bp, Artificial Sequence
  Description of Artificial Sequence: Synthetic oligonucleotide
gcatctccacaacggtgcg

SEQ ID NO: 4285 - DNA, 19 bp, Artificial Sequence
  Description of Artificial Sequence: Synthetic oligonucleotide
catctccacaacggtgcgc

SEQ ID NO: 4286 - DNA, 19 bp, Artificial Sequence
  Description of Artificial Sequence: Synthetic oligonucleotide
atctccacaacggtgcgcg

SEQ ID NO: 4287 - DNA, 19 bp, Artificial Sequence
  Description of Artificial Sequence: Synthetic oligonucleotide
tctccacaacggtgcgcgg

SEQ ID NO: 4288 - DNA, 19 bp, Artificial Sequence
  Description of Artificial Sequence: Synthetic oligonucleotide
ctccacaacggtgcgcgga

SEQ ID NO: 4289 - DNA, 19 bp, Artificial Sequence
  Description of Artificial Sequence: Synthetic oligonucleotide
tccacaacggtgcgcggat

SEQ ID NO: 4290 - DNA, 19 bp, Artificial Sequence
  Description of Artificial Sequence: Synthetic oligonucleotide
ccacaacggtgcgcggatc

SEQ ID NO: 4291 - DNA, 19 bp, Artificial Sequence
  Description of Artificial Sequence: Synthetic oligonucleotide
cacaacggtgcgcggatca

SEQ ID NO: 4292 - DNA, 19 bp, Artificial Sequence
  Description of Artificial Sequence: Synthetic oligonucleotide
acaacggtgcgcggatcac

SEQ ID NO: 4293 - DNA, 19 bp, Artificial Sequence
  Description of Artificial Sequence: Synthetic oligonucleotide
caacggtgcgcggatcaca

SEQ ID NO: 4294 - DNA, 19 bp, Artificial Sequence
  Description of Artificial Sequence: Synthetic oligonucleotide
aacggtgcgcggatcacag

SEQ ID NO: 4295 - DNA, 19 bp, Artificial Sequence
  Description of Artificial Sequence: Synthetic oligonucleotide
acggtgcgcggatcacagt

SEQ ID NO: 4296 - DNA, 19 bp, Artificial Sequence
  Description of Artificial Sequence: Synthetic oligonucleotide
cggtgcgcggatcacagtg

SEQ ID NO: 4297 - DNA, 19 bp, Artificial Sequence
  Description of Artificial Sequence: Synthetic oligonucleotide
ggtgcgcggatcacagtgc

SEQ ID NO: 4298 - DNA, 19 bp, Artificial Sequence
  Description of Artificial Sequence: Synthetic oligonucleotide
gtgcgcggatcacagtgca

SEQ ID NO: 4299 - DNA, 19 bp, Artificial Sequence
  Description of Artificial Sequence: Synthetic oligonucleotide
tgcgcggatcacagtgcag

SEQ ID NO: 4300 - DNA, 19 bp, Artificial Sequence
  Description of Artificial Sequence: Synthetic oligonucleotide
gcgcggatcacagtgcaga

SEQ ID NO: 4301 - DNA, 19 bp, Artificial Sequence
  Description of Artificial Sequence: Synthetic oligonucleotide
cgcggatcacagtgcagat

SEQ ID NO: 4302 - DNA, 19 bp, Artificial Sequence
  Description of Artificial Sequence: Synthetic oligonucleotide
gcggatcacagtgcagatg

SEQ ID NO: 4303 - DNA, 19 bp, Artificial Sequence
  Description of Artificial Sequence: Synthetic oligonucleotide
cggatcacagtgcagatgc

SEQ ID NO: 4304 - DNA, 19 bp, Artificial Sequence
  Description of Artificial Sequence: Synthetic oligonucleotide
ggatcacagtgcagatgcc

SEQ ID NO: 4305 - DNA, 19 bp, Artificial Sequence
  Description of Artificial Sequence: Synthetic oligonucleotide
gatcacagtgcagatgccc

SEQ ID NO: 4306 - DNA, 19 bp, Artificial Sequence
  Description of Artificial Sequence: Synthetic oligonucleotide
atcacagtgcagatgcccc

SEQ ID NO: 4307 - DNA, 19 bp, Artificial Sequence
  Description of Artificial Sequence: Synthetic oligonucleotide
tcacagtgcagatgccccc

SEQ ID NO: 4308 - DNA, 19 bp, Artificial Sequence
  Description of Artificial Sequence: Synthetic oligonucleotide
cacagtgcagatgcccccg

SEQ ID NO: 4309 - DNA, 19 bp, Artificial Sequence
  Description of Artificial Sequence: Synthetic oligonucleotide
acagtgcagatgcccccga

SEQ ID NO: 4310 - DNA, 19 bp, Artificial Sequence
  Description of Artificial Sequence: Synthetic oligonucleotide
cagtgcagatgcccccgac

SEQ ID NO: 4311 - DNA, 19 bp, Artificial Sequence
  Description of Artificial Sequence: Synthetic oligonucleotide
agtgcagatgcccccgacc

SEQ ID NO: 4312 - DNA, 19 bp, Artificial Sequence
  Description of Artificial Sequence: Synthetic oligonucleotide
gtgcagatgcccccgacca

SEQ ID NO: 4313 - DNA, 19 bp, Artificial Sequence
  Description of Artificial Sequence: Synthetic oligonucleotide
tgcagatgcccccgaccat

SEQ ID NO: 4314 - DNA, 19 bp, Artificial Sequence
  Description of Artificial Sequence: Synthetic oligonucleotide
gcagatgcccccgaccatc

SEQ ID NO: 4315 - DNA, 19 bp, Artificial Sequence
  Description of Artificial Sequence: Synthetic oligonucleotide
cagatgcccccgaccatcg

SEQ ID NO: 4316 - DNA, 19 bp, Artificial Sequence
  Description of Artificial Sequence: Synthetic oligonucleotide
agatgcccccgaccatcga

SEQ ID NO: 4317 - DNA, 19 bp, Artificial Sequence
  Description of Artificial Sequence: Synthetic oligonucleotide
gatgcccccgaccatcgag

SEQ ID NO: 4318 - DNA, 19 bp, Artificial Sequence
  Description of Artificial Sequence: Synthetic oligonucleotide
atgcccccgaccatcgagg

SEQ ID NO: 4319 - DNA, 19 bp, Artificial Sequence
  Description of Artificial Sequence: Synthetic oligonucleotide
tgcccccgaccatcgaggg

SEQ ID NO: 4320 - DNA, 19 bp, Artificial Sequence
  Description of Artificial Sequence: Synthetic oligonucleotide
gcccccgaccatcgagggc

SEQ ID NO: 4321 - DNA, 19 bp, Artificial Sequence
  Description of Artificial Sequence: Synthetic oligonucleotide
cccccgaccatcgagggcc

SEQ ID NO: 4322 - DNA, 19 bp, Artificial Sequence
  Description of Artificial Sequence: Synthetic oligonucleotide
ccccgaccatcgagggcca

SEQ ID NO: 4323 - DNA, 19 bp, Artificial Sequence
  Description of Artificial Sequence: Synthetic oligonucleotide
cccgaccatcgagggccac

SEQ ID NO: 4324 - DNA, 19 bp, Artificial Sequence
  Description of Artificial Sequence: Synthetic oligonucleotide
ccgaccatcgagggccact

SEQ ID NO: 4325 - DNA, 19 bp, Artificial Sequence
  Description of Artificial Sequence: Synthetic oligonucleotide
cgaccatcgagggccactg

SEQ ID NO: 4326 - DNA, 19 bp, Artificial Sequence
  Description of Artificial Sequence: Synthetic oligonucleotide
gaccatcgagggccactgg

SEQ ID NO: 4327 - DNA, 19 bp, Artificial Sequence
  Description of Artificial Sequence: Synthetic oligonucleotide
accatcgagggccactggg

SEQ ID NO: 4328 - DNA, 19 bp, Artificial Sequence
  Description of Artificial Sequence: Synthetic oligonucleotide
ccatcgagggccactgggt

SEQ ID NO: 4329 - DNA, 19 bp, Artificial Sequence
  Description of Artificial Sequence: Synthetic oligonucleotide
catcgagggccactgggtg

SEQ ID NO: 4330 - DNA, 19 bp, Artificial Sequence
  Description of Artificial Sequence: Synthetic oligonucleotide
atcgagggccactgggtgt

SEQ ID NO: 4331 - DNA, 19 bp, Artificial Sequence
  Description of Artificial Sequence: Synthetic oligonucleotide
tcgagggccactgggtgtc

SEQ ID NO: 4332 - DNA, 19 bp, Artificial Sequence
  Description of Artificial Sequence: Synthetic oligonucleotide
cgagggccactgggtgtcc

SEQ ID NO: 4333 - DNA, 19 bp, Artificial Sequence
  Description of Artificial Sequence: Synthetic oligonucleotide
gagggccactgggtgtcca

SEQ ID NO: 4334 - DNA, 19 bp, Artificial Sequence
  Description of Artificial Sequence: Synthetic oligonucleotide
agggccactgggtgtccac

SEQ ID NO: 4335 - DNA, 19 bp, Artificial Sequence
  Description of Artificial Sequence: Synthetic oligonucleotide
gggccactgggtgtccaca

SEQ ID NO: 4336 - DNA, 19 bp, Artificial Sequence
  Description of Artificial Sequence: Synthetic oligonucleotide
ggccactgggtgtccacag

SEQ ID NO: 4337 - DNA, 19 bp, Artificial Sequence
  Description of Artificial Sequence: Synthetic oligonucleotide
gccactgggtgtccacagg

SEQ ID NO: 4338 - DNA, 19 bp, Artificial Sequence
  Description of Artificial Sequence: Synthetic oligonucleotide
ccactgggtgtccacaggc

SEQ ID NO: 4339 - DNA, 19 bp, Artificial Sequence
  Description of Artificial Sequence: Synthetic oligonucleotide
cactgggtgtccacaggct

SEQ ID NO: 4340 - DNA, 19 bp, Artificial Sequence
  Description of Artificial Sequence: Synthetic oligonucleotide
actgggtgtccacaggctg

SEQ ID NO: 4341 - DNA, 19 bp, Artificial Sequence
  Description of Artificial Sequence: Synthetic oligonucleotide
ctgggtgtccacaggctgt

SEQ ID NO: 4342 - DNA, 19 bp, Artificial Sequence
  Description of Artificial Sequence: Synthetic oligonucleotide
tgggtgtccacaggctgtg

SEQ ID NO: 4343 - DNA, 19 bp, Artificial Sequence
  Description of Artificial Sequence: Synthetic oligonucleotide
gggtgtccacaggctgtga

SEQ ID NO: 4344 - DNA, 19 bp, Artificial Sequence
  Description of Artificial Sequence: Synthetic oligonucleotide
ggtgtccacaggctgtgaa

SEQ ID NO: 4345 - DNA, 19 bp, Artificial Sequence
  Description of Artificial Sequence: Synthetic oligonucleotide
gtgtccacaggctgtgaag

SEQ ID NO: 4346 - DNA, 19 bp, Artificial Sequence
  Description of Artificial Sequence: Synthetic oligonucleotide
tgtccacaggctgtgaagt

SEQ ID NO: 4347 - DNA, 19 bp, Artificial Sequence
  Description of Artificial Sequence: Synthetic oligonucleotide
gtccacaggctgtgaagta

SEQ ID NO: 4348 - DNA, 19 bp, Artificial Sequence
  Description of Artificial Sequence: Synthetic oligonucleotide
tccacaggctgtgaagtaa

SEQ ID NO: 4349 - DNA, 19 bp, Artificial Sequence
  Description of Artificial Sequence: Synthetic oligonucleotide
ccacaggctgtgaagtaag

SEQ ID NO: 4350 - DNA, 19 bp, Artificial Sequence
  Description of Artificial Sequence: Synthetic oligonucleotide
cacaggctgtgaagtaagg

SEQ ID NO: 4351 - DNA, 19 bp, Artificial Sequence
  Description of Artificial Sequence: Synthetic oligonucleotide
acaggctgtgaagtaaggt

SEQ ID NO: 4352 - DNA, 19 bp, Artificial Sequence
  Description of Artificial Sequence: Synthetic oligonucleotide
caggctgtgaagtaaggtc

SEQ ID NO: 4353 - DNA, 19 bp, Artificial Sequence
  Description of Artificial Sequence: Synthetic oligonucleotide
aggctgtgaagtaaggtcg

SEQ ID NO: 4354 - DNA, 19 bp, Artificial Sequence
  Description of Artificial Sequence: Synthetic oligonucleotide
ggctgtgaagtaaggtcgg

SEQ ID NO: 4355 - DNA, 19 bp, Artificial Sequence
  Description of Artificial Sequence: Synthetic oligonucleotide
gctgtgaagtaaggtcggg

SEQ ID NO: 4356 - DNA, 19 bp, Artificial Sequence
  Description of Artificial Sequence: Synthetic oligonucleotide
ctgtgaagtaaggtcgggt

SEQ ID NO: 4357 - DNA, 19 bp, Artificial Sequence
  Description of Artificial Sequence: Synthetic oligonucleotide
tgtgaagtaaggtcgggtc

SEQ ID NO: 4358 - DNA, 19 bp, Artificial Sequence
  Description of Artificial Sequence: Synthetic oligonucleotide
gtgaagtaaggtcgggtcc

SEQ ID NO: 4359 - DNA, 19 bp, Artificial Sequence
  Description of Artificial Sequence: Synthetic oligonucleotide
tgaagtaaggtcgggtccg

SEQ ID NO: 4360 - DNA, 19 bp, Artificial Sequence
  Description of Artificial Sequence: Synthetic oligonucleotide
gaagtaaggtcgggtccgg

SEQ ID NO: 4361 - DNA, 19 bp, Artificial Sequence
  Description of Artificial Sequence: Synthetic oligonucleotide
aagtaaggtcgggtccgga

SEQ ID NO: 4362 - DNA, 19 bp, Artificial Sequence
  Description of Artificial Sequence: Synthetic oligonucleotide
agtaaggtcgggtccggag

SEQ ID NO: 4363 - DNA, 19 bp, Artificial Sequence
  Description of Artificial Sequence: Synthetic oligonucleotide
gtaaggtcgggtccggagt

SEQ ID NO: 4364 - DNA, 19 bp, Artificial Sequence
  Description of Artificial Sequence: Synthetic oligonucleotide
taaggtcgggtccggagtt

SEQ ID NO: 4365 - DNA, 19 bp, Artificial Sequence
  Description of Artificial Sequence: Synthetic oligonucleotide
aaggtcgggtccggagttc

SEQ ID NO: 4366 - DNA, 19 bp, Artificial Sequence
  Description of Artificial Sequence: Synthetic oligonucleotide
aggtcgggtccggagttca

SEQ ID NO: 4367 - DNA, 19 bp, Artificial Sequence
  Description of Artificial Sequence: Synthetic oligonucleotide
ggtcgggtccggagttcat

SEQ ID NO: 4368 - DNA, 19 bp, Artificial Sequence
  Description of Artificial Sequence: Synthetic oligonucleotide
gtcgggtccggagttcatg

SEQ ID NO: 4369 - DNA, 19 bp, Artificial Sequence
  Description of Artificial Sequence: Synthetic oligonucleotide
tcgggtccggagttcatga

SEQ ID NO: 4370 - DNA, 19 bp, Artificial Sequence
  Description of Artificial Sequence: Synthetic oligonucleotide
cgggtccggagttcatgac

SEQ ID NO: 4371 - DNA, 19 bp, Artificial Sequence
  Description of Artificial Sequence: Synthetic oligonucleotide
gggtccggagttcatgaca

SEQ ID NO: 4372 - DNA, 19 bp, Artificial Sequence
  Description of Artificial Sequence: Synthetic oligonucleotide
ggtccggagttcatgacaa

SEQ ID NO: 4373 - DNA, 19 bp, Artificial Sequence
  Description of Artificial Sequence: Synthetic oligonucleotide
gtccggagttcatgacaag

SEQ ID NO: 4374 - DNA, 19 bp, Artificial Sequence
  Description of Artificial Sequence: Synthetic oligonucleotide
tccggagttcatgacaagg

SEQ ID NO: 4375 - DNA, 19 bp, Artificial Sequence
  Description of Artificial Sequence: Synthetic oligonucleotide
ccggagttcatgacaaggt

SEQ ID NO: 4376 - DNA, 19 bp, Artificial Sequence
  Description of Artificial Sequence: Synthetic oligonucleotide
cggagttcatgacaaggtc

SEQ ID NO: 4377 - DNA, 19 bp, Artificial Sequence
  Description of Artificial Sequence: Synthetic oligonucleotide
ggagttcatgacaaggtct

SEQ ID NO: 4378 - DNA, 19 bp, Artificial Sequence
  Description of Artificial Sequence: Synthetic oligonucleotide
gagttcatgacaaggtctt

SEQ ID NO: 4379 - DNA, 19 bp, Artificial Sequence
  Description of Artificial Sequence: Synthetic oligonucleotide
agttcatgacaaggtctta

SEQ ID NO: 4380 - DNA, 19 bp, Artificial Sequence
  Description of Artificial Sequence: Synthetic oligonucleotide
gttcatgacaaggtcttac

SEQ ID NO: 4381 - DNA, 19 bp, Artificial Sequence
  Description of Artificial Sequence: Synthetic oligonucleotide
ttcatgacaaggtcttaca

SEQ ID NO: 4382 - DNA, 19 bp, Artificial Sequence
  Description of Artificial Sequence: Synthetic oligonucleotide
tcatgacaaggtcttacag

SEQ ID NO: 4383 - DNA, 19 bp, Artificial Sequence
  Description of Artificial Sequence: Synthetic oligonucleotide
catgacaaggtcttacagg

SEQ ID NO: 4384 - DNA, 19 bp, Artificial Sequence
  Description of Artificial Sequence: Synthetic oligonucleotide
atgacaaggtcttacaggt

SEQ ID NO: 4385 - DNA, 19 bp, Artificial Sequence
  Description of Artificial Sequence: Synthetic oligonucleotide
tgacaaggtcttacaggtt

SEQ ID NO: 4386 - DNA, 19 bp, Artificial Sequence
  Description of Artificial Sequence: Synthetic oligonucleotide
gacaaggtcttacaggttc

SEQ ID NO: 4387 - DNA, 19 bp, Artificial Sequence
  Description of Artificial Sequence: Synthetic oligonucleotide
acaaggtcttacaggttct

SEQ ID NO: 4388 - DNA, 19 bp, Artificial Sequence
  Description of Artificial Sequence: Synthetic oligonucleotide
caaggtcttacaggttcta

SEQ ID NO: 4389 - DNA, 19 bp, Artificial Sequence
  Description of Artificial Sequence: Synthetic oligonucleotide
aaggtcttacaggttctac

SEQ ID NO: 4390 - DNA, 19 bp, Artificial Sequence
  Description of Artificial Sequence: Synthetic oligonucleotide
aggtcttacaggttctaca

SEQ ID NO: 4391 - DNA, 19 bp, Artificial Sequence
  Description of Artificial Sequence: Synthetic oligonucleotide
ggtcttacaggttctacaa

SEQ ID NO: 4392 - DNA, 19 bp, Artificial Sequence
  Description of Artificial Sequence: Synthetic oligonucleotide
gtcttacaggttctacaac

SEQ ID NO: 4393 - DNA, 19 bp, Artificial Sequence
  Description of Artificial Sequence: Synthetic oligonucleotide
tcttacaggttctacaaca

SEQ ID NO: 4394 - DNA, 19 bp, Artificial Sequence
  Description of Artificial Sequence: Synthetic oligonucleotide
cttacaggttctacaacaa

SEQ ID NO: 4395 - DNA, 19 bp, Artificial Sequence
  Description of Artificial Sequence: Synthetic oligonucleotide
ttacaggttctacaacaat

SEQ ID NO: 4396 - DNA, 19 bp, Artificial Sequence
  Description of Artificial Sequence: Synthetic oligonucleotide
tacaggttctacaacaata

SEQ ID NO: 4397 - DNA, 19 bp, Artificial Sequence
  Description of Artificial Sequence: Synthetic oligonucleotide
acaggttctacaacaataa

SEQ ID NO: 4398 - DNA, 19 bp, Artificial Sequence
  Description of Artificial Sequence: Synthetic oligonucleotide
caggttctacaacaataat

SEQ ID NO: 4399 - DNA, 19 bp, Artificial Sequence
  Description of Artificial Sequence: Synthetic oligonucleotide
aggttctacaacaataata

SEQ ID NO: 4400 - DNA, 19 bp, Artificial Sequence
  Description of Artificial Sequence: Synthetic oligonucleotide
ggttctacaacaataatac

SEQ ID NO: 4401 - DNA, 19 bp, Artificial Sequence
  Description of Artificial Sequence: Synthetic oligonucleotide
gttctacaacaataatacc

SEQ ID NO: 4402 - DNA, 19 bp, Artificial Sequence
  Description of Artificial Sequence: Synthetic oligonucleotide
ttctacaacaataatacct

SEQ ID NO: 4403 - DNA, 19 bp, Artificial Sequence
  Description of Artificial Sequence: Synthetic oligonucleotide
tctacaacaataatacctt

SEQ ID NO: 4404 - DNA, 19 bp, Artificial Sequence
  Description of Artificial Sequence: Synthetic oligonucleotide
ctacaacaataataccttc

SEQ ID NO: 4405 - DNA, 19 bp, Artificial Sequence
  Description of Artificial Sequence: Synthetic oligonucleotide
tacaacaataataccttca

SEQ ID NO: 4406 - DNA, 19 bp, Artificial Sequence
  Description of Artificial Sequence: Synthetic oligonucleotide
acaacaataataccttcaa

SEQ ID NO: 4407 - DNA, 19 bp, Artificial Sequence
  Description of Artificial Sequence: Synthetic oligonucleotide
caacaataataccttcaag

SEQ ID NO: 4408 - DNA, 19 bp, Artificial Sequence
  Description of Artificial Sequence: Synthetic oligonucleotide
aacaataataccttcaagg

SEQ ID NO: 4409 - DNA, 19 bp, Artificial Sequence
  Description of Artificial Sequence: Synthetic oligonucleotide
acaataataccttcaaggc

SEQ ID NO: 4410 - DNA, 19 bp, Artificial Sequence
  Description of Artificial Sequence: Synthetic oligonucleotide
caataataccttcaaggcc

SEQ ID NO: 4411 - DNA, 19 bp, Artificial Sequence
  Description of Artificial Sequence: Synthetic oligonucleotide
aataataccttcaaggcct

SEQ ID NO: 4412 - DNA, 19 bp, Artificial Sequence
  Description of Artificial Sequence: Synthetic oligonucleotide
ataataccttcaaggccta

SEQ ID NO: 4413 - DNA, 19 bp, Artificial Sequence
  Description of Artificial Sequence: Synthetic oligonucleotide
taataccttcaaggcctac

SEQ ID NO: 4414 - DNA, 19 bp, Artificial Sequence
  Description of Artificial Sequence: Synthetic oligonucleotide
aataccttcaaggcctacc

SEQ ID NO: 4415 - DNA, 19 bp, Artificial Sequence
  Description of Artificial Sequence: Synthetic oligonucleotide
ataccttcaaggcctacca

SEQ ID NO: 4416 - DNA, 19 bp, Artificial Sequence
  Description of Artificial Sequence: Synthetic oligonucleotide
taccttcaaggcctaccag

SEQ ID NO: 4417 - DNA, 19 bp, Artificial Sequence
  Description of Artificial Sequence: Synthetic oligonucleotide
accttcaaggcctaccagt

SEQ ID NO: 4418 - DNA, 19 bp, Artificial Sequence
  Description of Artificial Sequence: Synthetic oligonucleotide
ccttcaaggcctaccagtt

SEQ ID NO: 4419 - DNA, 19 bp, Artificial Sequence
  Description of Artificial Sequence: Synthetic oligonucleotide
cttcaaggcctaccagttt

SEQ ID NO: 4420 - DNA, 19 bp, Artificial Sequence
  Description of Artificial Sequence: Synthetic oligonucleotide
ttcaaggcctaccagtttt

SEQ ID NO: 4421 - DNA, 19 bp, Artificial Sequence
  Description of Artificial Sequence: Synthetic oligonucleotide
tcaaggcctaccagtttta

SEQ ID NO: 4422 - DNA, 19 bp, Artificial Sequence
  Description of Artificial Sequence: Synthetic oligonucleotide
caaggcctaccagttttac

SEQ ID NO: 4423 - DNA, 19 bp, Artificial Sequence
  Description of Artificial Sequence: Synthetic oligonucleotide
aaggcctaccagttttact

SEQ ID NO: 4424 - DNA, 19 bp, Artificial Sequence
  Description of Artificial Sequence: Synthetic oligonucleotide
aggcctaccagttttacta

SEQ ID NO: 4425 - DNA, 19 bp, Artificial Sequence
  Description of Artificial Sequence: Synthetic oligonucleotide
ggcctaccagttttactat

SEQ ID NO: 4426 - DNA, 19 bp, Artificial Sequence
  Description of Artificial Sequence: Synthetic oligonucleotide
gcctaccagttttactatg

SEQ ID NO: 4427 - DNA, 19 bp, Artificial Sequence
  Description of Artificial Sequence: Synthetic oligonucleotide
cctaccagttttactatgg

SEQ ID NO: 4428 - DNA, 19 bp, Artificial Sequence
  Description of Artificial Sequence: Synthetic oligonucleotide
ctaccagttttactatggc

SEQ ID NO: 4429 - DNA, 19 bp, Artificial Sequence
  Description of Artificial Sequence: Synthetic oligonucleotide
taccagttttactatggca

SEQ ID NO: 4430 - DNA, 19 bp, Artificial Sequence
  Description of Artificial Sequence: Synthetic oligonucleotide
accagttttactatggcag

SEQ ID NO: 4431 - DNA, 19 bp, Artificial Sequence
  Description of Artificial Sequence: Synthetic oligonucleotide
ccagttttactatggcagc

SEQ ID NO: 4432 - DNA, 19 bp, Artificial Sequence
  Description of Artificial Sequence: Synthetic oligonucleotide
cagttttactatggcagca

SEQ ID NO: 4433 - DNA, 19 bp, Artificial Sequence
  Description of Artificial Sequence: Synthetic oligonucleotide
agttttactatggcagcaa

SEQ ID NO: 4434 - DNA, 19 bp, Artificial Sequence
  Description of Artificial Sequence: Synthetic oligonucleotide
gttttactatggcagcaac

SEQ ID NO: 4435 - DNA, 19 bp, Artificial Sequence
  Description of Artificial Sequence: Synthetic oligonucleotide
ttttactatggcagcaacc

SEQ ID NO: 4436 - DNA, 19 bp, Artificial Sequence
  Description of Artificial Sequence: Synthetic oligonucleotide
tttactatggcagcaaccg

SEQ ID NO: 4437 - DNA, 19 bp, Artificial Sequence
  Description of Artificial Sequence: Synthetic oligonucleotide
ttactatggcagcaaccgc

SEQ ID NO: 4438 - DNA, 19 bp, Artificial Sequence
  Description of Artificial Sequence: Synthetic oligonucleotide
tactatggcagcaaccgct

SEQ ID NO: 4439 - DNA, 19 bp, Artificial Sequence
  Description of Artificial Sequence: Synthetic oligonucleotide
actatggcagcaaccgctg

SEQ ID NO: 4440 - DNA, 19 bp, Artificial Sequence
  Description of Artificial Sequence: Synthetic oligonucleotide
ctatggcagcaaccgctgt

SEQ ID NO: 4441 - DNA, 19 bp, Artificial Sequence
  Description of Artificial Sequence: Synthetic oligonucleotide
tatggcagcaaccgctgta

SEQ ID NO: 4442 - DNA, 19 bp, Artificial Sequence
  Description of Artificial Sequence: Synthetic oligonucleotide
atggcagcaaccgctgtac

SEQ ID NO: 4443 - DNA, 19 bp, Artificial Sequence
  Description of Artificial Sequence: Synthetic oligonucleotide
tggcagcaaccgctgtaca

SEQ ID NO: 4444 - DNA, 19 bp, Artificial Sequence
  Description of Artificial Sequence: Synthetic oligonucleotide
ggcagcaaccgctgtacaa

SEQ ID NO: 4445 - DNA, 19 bp, Artificial Sequence
  Description of Artificial Sequence: Synthetic oligonucleotide
gcagcaaccgctgtacaaa

SEQ ID NO: 4446 - DNA, 19 bp, Artificial Sequence
  Description of Artificial Sequence: Synthetic oligonucleotide
cagcaaccgctgtacaaac

SEQ ID NO: 4447 - DNA, 19 bp, Artificial Sequence
  Description of Artificial Sequence: Synthetic oligonucleotide
agcaaccgctgtacaaacc

SEQ ID NO: 4448 - DNA, 19 bp, Artificial Sequence
  Description of Artificial Sequence: Synthetic oligonucleotide
gcaaccgctgtacaaaccc

SEQ ID NO: 4449 - DNA, 19 bp, Artificial Sequence
  Description of Artificial Sequence: Synthetic oligonucleotide
caaccgctgtacaaacccc

SEQ ID NO: 4450 - DNA, 19 bp, Artificial Sequence
  Description of Artificial Sequence: Synthetic oligonucleotide
aaccgctgtacaaacccca

SEQ ID NO: 4451 - DNA, 19 bp, Artificial Sequence
  Description of Artificial Sequence: Synthetic oligonucleotide
accgctgtacaaaccccac

SEQ ID NO: 4452 - DNA, 19 bp, Artificial Sequence
  Description of Artificial Sequence: Synthetic oligonucleotide
ccgctgtacaaaccccacc

SEQ ID NO: 4453 - DNA, 19 bp, Artificial Sequence
  Description of Artificial Sequence: Synthetic oligonucleotide
cgctgtacaaaccccacct

SEQ ID NO: 4454 - DNA, 19 bp, Artificial Sequence
  Description of Artificial Sequence: Synthetic oligonucleotide
gctgtacaaaccccaccta

SEQ ID NO: 4455 - DNA, 19 bp, Artificial Sequence
  Description of Artificial Sequence: Synthetic oligonucleotide
ctgtacaaaccccacctac

SEQ ID NO: 4456 - DNA, 19 bp, Artificial Sequence
  Description of Artificial Sequence: Synthetic oligonucleotide
tgtacaaaccccacctaca

SEQ ID NO: 4457 - DNA, 19 bp, Artificial Sequence
  Description of Artificial Sequence: Synthetic oligonucleotide
gtacaaaccccacctacac

SEQ ID NO: 4458 - DNA, 19 bp, Artificial Sequence
  Description of Artificial Sequence: Synthetic oligonucleotide
tacaaaccccacctacacc

SEQ ID NO: 4459 - DNA, 19 bp, Artificial Sequence
  Description of Artificial Sequence: Synthetic oligonucleotide
acaaaccccacctacaccc

SEQ ID NO: 4460 - DNA, 19 bp, Artificial Sequence
  Description of Artificial Sequence: Synthetic oligonucleotide
caaaccccacctacaccct

SEQ ID NO: 4461 - DNA, 19 bp, Artificial Sequence
  Description of Artificial Sequence: Synthetic oligonucleotide
aaaccccacctacaccctc

SEQ ID NO: 4462 - DNA, 19 bp, Artificial Sequence
  Description of Artificial Sequence: Synthetic oligonucleotide
aaccccacctacaccctca

SEQ ID NO: 4463 - DNA, 19 bp, Artificial Sequence
  Description of Artificial Sequence: Synthetic oligonucleotide
accccacctacaccctcat

SEQ ID NO: 4464 - DNA, 19 bp, Artificial Sequence
  Description of Artificial Sequence: Synthetic oligonucleotide
ccccacctacaccctcatc

SEQ ID NO: 4465 - DNA, 19 bp, Artificial Sequence
  Description of Artificial Sequence: Synthetic oligonucleotide
cccacctacaccctcatca

SEQ ID NO: 4466 - DNA, 19 bp, Artificial Sequence
  Description of Artificial Sequence: Synthetic oligonucleotide
ccacctacaccctcatcat

SEQ ID NO: 4467 - DNA, 19 bp, Artificial Sequence
  Description of Artificial Sequence: Synthetic oligonucleotide
cacctacaccctcatcatc

SEQ ID NO: 4468 - DNA, 19 bp, Artificial Sequence
  Description of Artificial Sequence: Synthetic oligonucleotide
acctacaccctcatcatcc

SEQ ID NO: 4469 - DNA, 19 bp, Artificial Sequence
  Description of Artificial Sequence: Synthetic oligonucleotide
cctacaccctcatcatccg

SEQ ID NO: 4470 - DNA, 19 bp, Artificial Sequence
  Description of Artificial Sequence: Synthetic oligonucleotide
ctacaccctcatcatccga

SEQ ID NO: 4471 - DNA, 19 bp, Artificial Sequence
  Description of Artificial Sequence: Synthetic oligonucleotide
tacaccctcatcatccgag

SEQ ID NO: 4472 - DNA, 19 bp, Artificial Sequence
  Description of Artificial Sequence: Synthetic oligonucleotide
acaccctcatcatccgagg

SEQ ID NO: 4473 - DNA, 19 bp, Artificial Sequence
  Description of Artificial Sequence: Synthetic oligonucleotide
caccctcatcatccgaggc

SEQ ID NO: 4474 - DNA, 19 bp, Artificial Sequence
  Description of Artificial Sequence: Synthetic oligonucleotide
accctcatcatccgaggca

SEQ ID NO: 4475 - DNA, 19 bp, Artificial Sequence
  Description of Artificial Sequence: Synthetic oligonucleotide
ccctcatcatccgaggcaa

SEQ ID NO: 4476 - DNA, 19 bp, Artificial Sequence
  Description of Artificial Sequence: Synthetic oligonucleotide
cctcatcatccgaggcaag

SEQ ID NO: 4477 - DNA, 19 bp, Artificial Sequence
  Description of Artificial Sequence: Synthetic oligonucleotide
ctcatcatccgaggcaaga

SEQ ID NO: 4478 - DNA, 19 bp, Artificial Sequence
  Description of Artificial Sequence: Synthetic oligonucleotide
tcatcatccgaggcaagat

SEQ ID NO: 4479 - DNA, 19 bp, Artificial Sequence
  Description of Artificial Sequence: Synthetic oligonucleotide
catcatccgaggcaagatc

SEQ ID NO: 4480 - DNA, 19 bp, Artificial Sequence
  Description of Artificial Sequence: Synthetic oligonucleotide
atcatccgaggcaagatcc

SEQ ID NO: 4481 - DNA, 19 bp, Artificial Sequence
  Description of Artificial Sequence: Synthetic oligonucleotide
tcatccgaggcaagatccg

SEQ ID NO: 4482 - DNA, 19 bp, Artificial Sequence
  Description of Artificial Sequence: Synthetic oligonucleotide
catccgaggcaagatccgg

SEQ ID NO: 4483 - DNA, 19 bp, Artificial Sequence
  Description of Artificial Sequence: Synthetic oligonucleotide
atccgaggcaagatccggc

SEQ ID NO: 4484 - DNA, 19 bp, Artificial Sequence
  Description of Artificial Sequence: Synthetic oligonucleotide
tccgaggcaagatccggct

SEQ ID NO: 4485 - DNA, 19 bp, Artificial Sequence
  Description of Artificial Sequence: Synthetic oligonucleotide
ccgaggcaagatccggctt

SEQ ID NO: 4486 - DNA, 19 bp, Artificial Sequence
  Description of Artificial Sequence: Synthetic oligonucleotide
cgaggcaagatccggcttc

SEQ ID NO: 4487 - DNA, 19 bp, Artificial Sequence
  Description of Artificial Sequence: Synthetic oligonucleotide
gaggcaagatccggcttcg

SEQ ID NO: 4488 - DNA, 19 bp, Artificial Sequence
  Description of Artificial Sequence: Synthetic oligonucleotide
aggcaagatccggcttcgc

SEQ ID NO: 4489 - DNA, 19 bp, Artificial Sequence
  Description of Artificial Sequence: Synthetic oligonucleotide
ggcaagatccggcttcgcc

SEQ ID NO: 4490 - DNA, 19 bp, Artificial Sequence
  Description of Artificial Sequence: Synthetic oligonucleotide
gcaagatccggcttcgcca

SEQ ID NO: 4491 - DNA, 19 bp, Artificial Sequence
  Description of Artificial Sequence: Synthetic oligonucleotide
caagatccggcttcgccag

SEQ ID NO: 4492 - DNA, 19 bp, Artificial Sequence
  Description of Artificial Sequence: Synthetic oligonucleotide
aagatccggcttcgccagg

SEQ ID NO: 4493 - DNA, 19 bp, Artificial Sequence
  Description of Artificial Sequence: Synthetic oligonucleotide
agatccggcttcgccaggc

SEQ ID NO: 4494 - DNA, 19 bp, Artificial Sequence
  Description of Artificial Sequence: Synthetic oligonucleotide
gatccggcttcgccaggcg

SEQ ID NO: 4495 - DNA, 19 bp, Artificial Sequence
  Description of Artificial Sequence: Synthetic oligonucleotide
atccggcttcgccaggcgt

SEQ ID NO: 4496 - DNA, 19 bp, Artificial Sequence
  Description of Artificial Sequence: Synthetic oligonucleotide
tccggcttcgccaggcgtc

SEQ ID NO: 4497 - DNA, 19 bp, Artificial Sequence
  Description of Artificial Sequence: Synthetic oligonucleotide
ccggcttcgccaggcgtcc

SEQ ID NO: 4498 - DNA, 19 bp, Artificial Sequence
  Description of Artificial Sequence: Synthetic oligonucleotide
cggcttcgccaggcgtcct

SEQ ID NO: 4499 - DNA, 19 bp, Artificial Sequence
  Description of Artificial Sequence: Synthetic oligonucleotide
ggcttcgccaggcgtcctg

SEQ ID NO: 4500 - DNA, 19 bp, Artificial Sequence
  Description of Artificial Sequence: Synthetic oligonucleotide
gcttcgccaggcgtcctgg

SEQ ID NO: 4501 - DNA, 19 bp, Artificial Sequence
  Description of Artificial Sequence: Synthetic oligonucleotide
cttcgccaggcgtcctgga

SEQ ID NO: 4502 - DNA, 19 bp, Artificial Sequence
  Description of Artificial Sequence: Synthetic oligonucleotide
ttcgccaggcgtcctggat

SEQ ID NO: 4503 - DNA, 19 bp, Artificial Sequence
  Description of Artificial Sequence: Synthetic oligonucleotide
tcgccaggcgtcctggatc

SEQ ID NO: 4504 - DNA, 19 bp, Artificial Sequence
  Description of Artificial Sequence: Synthetic oligonucleotide
cgccaggcgtcctggatca

SEQ ID NO: 4505 - DNA, 19 bp, Artificial Sequence
  Description of Artificial Sequence: Synthetic oligonucleotide
gccaggcgtcctggatcat

SEQ ID NO: 4506 - DNA, 19 bp, Artificial Sequence
  Description of Artificial Sequence: Synthetic oligonucleotide
ccaggcgtcctggatcatc

SEQ ID NO: 4507 - DNA, 19 bp, Artificial Sequence
  Description of Artificial Sequence: Synthetic oligonucleotide
caggcgtcctggatcatcc

SEQ ID NO: 4508 - DNA, 19 bp, Artificial Sequence
  Description of Artificial Sequence: Synthetic oligonucleotide
aggcgtcctggatcatccg

SEQ ID NO: 4509 - DNA, 19 bp, Artificial Sequence
  Description of Artificial Sequence: Synthetic oligonucleotide
ggcgtcctggatcatccgt

SEQ ID NO: 4510 - DNA, 19 bp, Artificial Sequence
  Description of Artificial Sequence: Synthetic oligonucleotide
gcgtcctggatcatccgtg

SEQ ID NO: 4511 - DNA, 19 bp, Artificial Sequence
  Description of Artificial Sequence: Synthetic oligonucleotide
cgtcctggatcatccgtgg

SEQ ID NO: 4512 - DNA, 19 bp, Artificial Sequence
  Description of Artificial Sequence: Synthetic oligonucleotide
gtcctggatcatccgtggg

SEQ ID NO: 4513 - DNA, 19 bp, Artificial Sequence
  Description of Artificial Sequence: Synthetic oligonucleotide
tcctggatcatccgtgggg

SEQ ID NO: 4514 - DNA, 19 bp, Artificial Sequence
  Description of Artificial Sequence: Synthetic oligonucleotide
cctggatcatccgtggggg

SEQ ID NO: 4515 - DNA, 19 bp, Artificial Sequence
  Description of Artificial Sequence: Synthetic oligonucleotide
ctggatcatccgtgggggc

SEQ ID NO: 4516 - DNA, 19 bp, Artificial Sequence
  Description of Artificial Sequence: Synthetic oligonucleotide
tggatcatccgtgggggca

SEQ ID NO: 4517 - DNA, 19 bp, Artificial Sequence
  Description of Artificial Sequence: Synthetic oligonucleotide
ggatcatccgtgggggcac

SEQ ID NO: 4518 - DNA, 19 bp, Artificial Sequence
  Description of Artificial Sequence: Synthetic oligonucleotide
gatcatccgtgggggcacc

SEQ ID NO: 4519 - DNA, 19 bp, Artificial Sequence
  Description of Artificial Sequence: Synthetic oligonucleotide
atcatccgtgggggcaccg

SEQ ID NO: 4520 - DNA, 19 bp, Artificial Sequence
  Description of Artificial Sequence: Synthetic oligonucleotide
tcatccgtgggggcaccga

SEQ ID NO: 4521 - DNA, 19 bp, Artificial Sequence
  Description of Artificial Sequence: Synthetic oligonucleotide
catccgtgggggcaccgaa

SEQ ID NO: 4522 - DNA, 19 bp, Artificial Sequence
  Description of Artificial Sequence: Synthetic oligonucleotide
atccgtgggggcaccgaag

SEQ ID NO: 4523 - DNA, 19 bp, Artificial Sequence
  Description of Artificial Sequence: Synthetic oligonucleotide
tccgtgggggcaccgaagc

SEQ ID NO: 4524 - DNA, 19 bp, Artificial Sequence
  Description of Artificial Sequence: Synthetic oligonucleotide
ccgtgggggcaccgaagct

SEQ ID NO: 4525 - DNA, 19 bp, Artificial Sequence
  Description of Artificial Sequence: Synthetic oligonucleotide
cgtgggggcaccgaagctg

SEQ ID NO: 4526 - DNA, 19 bp, Artificial Sequence
  Description of Artificial Sequence: Synthetic oligonucleotide
gtgggggcaccgaagctga

SEQ ID NO: 4527 - DNA, 19 bp, Artificial Sequence
  Description of Artificial Sequence: Synthetic oligonucleotide
tgggggcaccgaagctgac

SEQ ID NO: 4528 - DNA, 19 bp, Artificial Sequence
  Description of Artificial Sequence: Synthetic oligonucleotide
gggggcaccgaagctgact

SEQ ID NO: 4529 - DNA, 19 bp, Artificial Sequence
  Description of Artificial Sequence: Synthetic oligonucleotide
ggggcaccgaagctgacta

SEQ ID NO: 4530 - DNA, 19 bp, Artificial Sequence
  Description of Artificial Sequence: Synthetic oligonucleotide
gggcaccgaagctgactac

SEQ ID NO: 4531 - DNA, 19 bp, Artificial Sequence
  Description of Artificial Sequence: Synthetic oligonucleotide
ggcaccgaagctgactacc

SEQ ID NO: 4532 - DNA, 19 bp, Artificial Sequence
  Description of Artificial Sequence: Synthetic oligonucleotide
gcaccgaagctgactacca

SEQ ID NO: 4533 - DNA, 19 bp, Artificial Sequence
  Description of Artificial Sequence: Synthetic oligonucleotide
caccgaagctgactaccag

SEQ ID NO: 4534 - DNA, 19 bp, Artificial Sequence
  Description of Artificial Sequence: Synthetic oligonucleotide
accgaagctgactaccagc

SEQ ID NO: 4535 - DNA, 19 bp, Artificial Sequence
  Description of Artificial Sequence: Synthetic oligonucleotide
ccgaagctgactaccagct

SEQ ID NO: 4536 - DNA, 19 bp, Artificial Sequence
  Description of Artificial Sequence: Synthetic oligonucleotide
cgaagctgactaccagctt

SEQ ID NO: 4537 - DNA, 19 bp, Artificial Sequence
  Description of Artificial Sequence: Synthetic oligonucleotide
gaagctgactaccagcttc

SEQ ID NO: 4538 - DNA, 19 bp, Artificial Sequence
  Description of Artificial Sequence: Synthetic oligonucleotide
aagctgactaccagcttca

SEQ ID NO: 4539 - DNA, 19 bp, Artificial Sequence
  Description of Artificial Sequence: Synthetic oligonucleotide
agctgactaccagcttcac

SEQ ID NO: 4540 - DNA, 19 bp, Artificial Sequence
  Description of Artificial Sequence: Synthetic oligonucleotide
gctgactaccagcttcacg

SEQ ID NO: 4541 - DNA, 19 bp, Artificial Sequence
  Description of Artificial Sequence: Synthetic oligonucleotide
ctgactaccagcttcacgg

SEQ ID NO: 4542 - DNA, 19 bp, Artificial Sequence
  Description of Artificial Sequence: Synthetic oligonucleotide
tgactaccagcttcacggc

SEQ ID NO: 4543 - DNA, 19 bp, Artificial Sequence
  Description of Artificial Sequence: Synthetic oligonucleotide
gactaccagcttcacggcg

SEQ ID NO: 4544 - DNA, 19 bp, Artificial Sequence
  Description of Artificial Sequence: Synthetic oligonucleotide
actaccagcttcacggcgt

SEQ ID NO: 4545 - DNA, 19 bp, Artificial Sequence
  Description of Artificial Sequence: Synthetic oligonucleotide
ctaccagcttcacggcgtc

SEQ ID NO: 4546 - DNA, 19 bp, Artificial Sequence
  Description of Artificial Sequence: Synthetic oligonucleotide
taccagcttcacggcgtcc

SEQ ID NO: 4547 - DNA, 19 bp, Artificial Sequence
  Description of Artificial Sequence: Synthetic oligonucleotide
accagcttcacggcgtcca

SEQ ID NO: 4548 - DNA, 19 bp, Artificial Sequence
  Description of Artificial Sequence: Synthetic oligonucleotide
ccagcttcacggcgtccaa

SEQ ID NO: 4549 - DNA, 19 bp, Artificial Sequence
  Description of Artificial Sequence: Synthetic oligonucleotide
cagcttcacggcgtccaag

SEQ ID NO: 4550 - DNA, 19 bp, Artificial Sequence
  Description of Artificial Sequence: Synthetic oligonucleotide
agcttcacggcgtccaagt

SEQ ID NO: 4551 - DNA, 19 bp, Artificial Sequence
  Description of Artificial Sequence: Synthetic oligonucleotide
gcttcacggcgtccaagtc

SEQ ID NO: 4552 - DNA, 19 bp, Artificial Sequence
  Description of Artificial Sequence: Synthetic oligonucleotide
cttcacggcgtccaagtca

SEQ ID NO: 4553 - DNA, 19 bp, Artificial Sequence
  Description of Artificial Sequence: Synthetic oligonucleotide
ttcacggcgtccaagtcat

SEQ ID NO: 4554 - DNA, 19 bp, Artificial Sequence
  Description of Artificial Sequence: Synthetic oligonucleotide
tcacggcgtccaagtcatc

SEQ ID NO: 4555 - DNA, 19 bp, Artificial Sequence
  Description of Artificial Sequence: Synthetic oligonucleotide
cacggcgtccaagtcatct

SEQ ID NO: 4556 - DNA, 19 bp, Artificial Sequence
  Description of Artificial Sequence: Synthetic oligonucleotide
acggcgtccaagtcatctg

SEQ ID NO: 4557 - DNA, 19 bp, Artificial Sequence
  Description of Artificial Sequence: Synthetic oligonucleotide
cggcgtccaagtcatctgc

SEQ ID NO: 4558 - DNA, 19 bp, Artificial Sequence
  Description of Artificial Sequence: Synthetic oligonucleotide
ggcgtccaagtcatctgcc

SEQ ID NO: 4559 - DNA, 19 bp, Artificial Sequence
  Description of Artificial Sequence: Synthetic oligonucleotide
gcgtccaagtcatctgcca

SEQ ID NO: 4560 - DNA, 19 bp, Artificial Sequence
  Description of Artificial Sequence: Synthetic oligonucleotide
cgtccaagtcatctgccac

SEQ ID NO: 4561 - DNA, 19 bp, Artificial Sequence
  Description of Artificial Sequence: Synthetic oligonucleotide
gtccaagtcatctgccaca

SEQ ID NO: 4562 - DNA, 19 bp, Artificial Sequence
  Description of Artificial Sequence: Synthetic oligonucleotide
tccaagtcatctgccacac

SEQ ID NO: 4563 - DNA, 19 bp, Artificial Sequence
  Description of Artificial Sequence: Synthetic oligonucleotide
ccaagtcatctgccacaca

SEQ ID NO: 4564 - DNA, 19 bp, Artificial Sequence
  Description of Artificial Sequence: Synthetic oligonucleotide
caagtcatctgccacacag

SEQ ID NO: 4565 - DNA, 19 bp, Artificial Sequence
  Description of Artificial Sequence: Synthetic oligonucleotide
aagtcatctgccacacaga

SEQ ID NO: 4566 - DNA, 19 bp, Artificial Sequence
  Description of Artificial Sequence: Synthetic oligonucleotide
agtcatctgccacacagag

SEQ ID NO: 4567 - DNA, 19 bp, Artificial Sequence
  Description of Artificial Sequence: Synthetic oligonucleotide
gtcatctgccacacagagg

SEQ ID NO: 4568 - DNA, 19 bp, Artificial Sequence
  Description of Artificial Sequence: Synthetic oligonucleotide
tcatctgccacacagaggc

SEQ ID NO: 4569 - DNA, 19 bp, Artificial Sequence
  Description of Artificial Sequence: Synthetic oligonucleotide
catctgccacacagaggca

SEQ ID NO: 4570 - DNA, 19 bp, Artificial Sequence
  Description of Artificial Sequence: Synthetic oligonucleotide
atctgccacacagaggcag

SEQ ID NO: 4571 - DNA, 19 bp, Artificial Sequence
  Description of Artificial Sequence: Synthetic oligonucleotide
tctgccacacagaggcagt

SEQ ID NO: 4572 - DNA, 19 bp, Artificial Sequence
  Description of Artificial Sequence: Synthetic oligonucleotide
ctgccacacagaggcagtc

SEQ ID NO: 4573 - DNA, 19 bp, Artificial Sequence
  Description of Artificial Sequence: Synthetic oligonucleotide
tgccacacagaggcagtcg

SEQ ID NO: 4574 - DNA, 19 bp, Artificial Sequence
  Description of Artificial Sequence: Synthetic oligonucleotide
gccacacagaggcagtcgc

SEQ ID NO: 4575 - DNA, 19 bp, Artificial Sequence
  Description of Artificial Sequence: Synthetic oligonucleotide
ccacacagaggcagtcgct

SEQ ID NO: 4576 - DNA, 19 bp, Artificial Sequence
  Description of Artificial Sequence: Synthetic oligonucleotide
cacacagaggcagtcgctg

SEQ ID NO: 4577 - DNA, 19 bp, Artificial Sequence
  Description of Artificial Sequence: Synthetic oligonucleotide
acacagaggcagtcgctga

SEQ ID NO: 4578 - DNA, 19 bp, Artificial Sequence
  Description of Artificial Sequence: Synthetic oligonucleotide
cacagaggcagtcgctgaa

SEQ ID NO: 4579 - DNA, 19 bp, Artificial Sequence
  Description of Artificial Sequence: Synthetic oligonucleotide
acagaggcagtcgctgaac

SEQ ID NO: 4580 - DNA, 19 bp, Artificial Sequence
  Description of Artificial Sequence: Synthetic oligonucleotide
cagaggcagtcgctgaaca

SEQ ID NO: 4581 - DNA, 19 bp, Artificial Sequence
  Description of Artificial Sequence: Synthetic oligonucleotide
agaggcagtcgctgaacag

SEQ ID NO: 4582 - DNA, 19 bp, Artificial Sequence
  Description of Artificial Sequence: Synthetic oligonucleotide
gaggcagtcgctgaacagc

SEQ ID NO: 4583 - DNA, 19 bp, Artificial Sequence
  Description of Artificial Sequence: Synthetic oligonucleotide
aggcagtcgctgaacagct

SEQ ID NO: 4584 - DNA, 19 bp, Artificial Sequence
  Description of Artificial Sequence: Synthetic oligonucleotide
ggcagtcgctgaacagctc

SEQ ID NO: 4585 - DNA, 19 bp, Artificial Sequence
  Description of Artificial Sequence: Synthetic oligonucleotide
gcagtcgctgaacagctca

SEQ ID NO: 4586 - DNA, 19 bp, Artificial Sequence
  Description of Artificial Sequence: Synthetic oligonucleotide
cagtcgctgaacagctcag

SEQ ID NO: 4587 - DNA, 19 bp, Artificial Sequence
  Description of Artificial Sequence: Synthetic oligonucleotide
agtcgctgaacagctcagc

SEQ ID NO: 4588 - DNA, 19 bp, Artificial Sequence
  Description of Artificial Sequence: Synthetic oligonucleotide
gtcgctgaacagctcagcc

SEQ ID NO: 4589 - DNA, 19 bp, Artificial Sequence
  Description of Artificial Sequence: Synthetic oligonucleotide
tcgctgaacagctcagccg

SEQ ID NO: 4590 - DNA, 19 bp, Artificial Sequence
  Description of Artificial Sequence: Synthetic oligonucleotide
cgctgaacagctcagccga

SEQ ID NO: 4591 - DNA, 19 bp, Artificial Sequence
  Description of Artificial Sequence: Synthetic oligonucleotide
gctgaacagctcagccgac

SEQ ID NO: 4592 - DNA, 19 bp, Artificial Sequence
  Description of Artificial Sequence: Synthetic oligonucleotide
ctgaacagctcagccgact

SEQ ID NO: 4593 - DNA, 19 bp, Artificial Sequence
  Description of Artificial Sequence: Synthetic oligonucleotide
tgaacagctcagccgactg

SEQ ID NO: 4594 - DNA, 19 bp, Artificial Sequence
  Description of Artificial Sequence: Synthetic oligonucleotide
gaacagctcagccgactgg

SEQ ID NO: 4595 - DNA, 19 bp, Artificial Sequence
  Description of Artificial Sequence: Synthetic oligonucleotide
aacagctcagccgactggt

SEQ ID NO: 4596 - DNA, 19 bp, Artificial Sequence
  Description of Artificial Sequence: Synthetic oligonucleotide
acagctcagccgactggtg

SEQ ID NO: 4597 - DNA, 19 bp, Artificial Sequence
  Description of Artificial Sequence: Synthetic oligonucleotide
cagctcagccgactggtga

SEQ ID NO: 4598 - DNA, 19 bp, Artificial Sequence
  Description of Artificial Sequence: Synthetic oligonucleotide
agctcagccgactggtgaa

SEQ ID NO: 4599 - DNA, 19 bp, Artificial Sequence
  Description of Artificial Sequence: Synthetic oligonucleotide
gctcagccgactggtgaac

SEQ ID NO: 4600 - DNA, 19 bp, Artificial Sequence
  Description of Artificial Sequence: Synthetic oligonucleotide
ctcagccgactggtgaacc

SEQ ID NO: 4601 - DNA, 19 bp, Artificial Sequence
  Description of Artificial Sequence: Synthetic oligonucleotide
tcagccgactggtgaaccg

SEQ ID NO: 4602 - DNA, 19 bp, Artificial Sequence
  Description of Artificial Sequence: Synthetic oligonucleotide
cagccgactggtgaaccga

SEQ ID NO: 4603 - DNA, 19 bp, Artificial Sequence
  Description of Artificial Sequence: Synthetic oligonucleotide
agccgactggtgaaccgaa

SEQ ID NO: 4604 - DNA, 19 bp, Artificial Sequence
  Description of Artificial Sequence: Synthetic oligonucleotide
gccgactggtgaaccgaac

SEQ ID NO: 4605 - DNA, 19 bp, Artificial Sequence
  Description of Artificial Sequence: Synthetic oligonucleotide
ccgactggtgaaccgaact

SEQ ID NO: 4606 - DNA, 19 bp, Artificial Sequence
  Description of Artificial Sequence: Synthetic oligonucleotide
cgactggtgaaccgaactt

SEQ ID NO: 4607 - DNA, 19 bp, Artificial Sequence
  Description of Artificial Sequence: Synthetic oligonucleotide
gactggtgaaccgaacttg

SEQ ID NO: 4608 - DNA, 19 bp, Artificial Sequence
  Description of Artificial Sequence: Synthetic oligonucleotide
actggtgaaccgaacttgc

SEQ ID NO: 4609 - DNA, 19 bp, Artificial Sequence
  Description of Artificial Sequence: Synthetic oligonucleotide
ctggtgaaccgaacttgcc

SEQ ID NO: 4610 - DNA, 19 bp, Artificial Sequence
  Description of Artificial Sequence: Synthetic oligonucleotide
tggtgaaccgaacttgccc

SEQ ID NO: 4611 - DNA, 19 bp, Artificial Sequence
  Description of Artificial Sequence: Synthetic oligonucleotide
ggtgaaccgaacttgccca

SEQ ID NO: 4612 - DNA, 19 bp, Artificial Sequence
  Description of Artificial Sequence: Synthetic oligonucleotide
gtgaaccgaacttgcccag

SEQ ID NO: 4613 - DNA, 19 bp, Artificial Sequence
  Description of Artificial Sequence: Synthetic oligonucleotide
tgaaccgaacttgcccagg

SEQ ID NO: 4614 - DNA, 19 bp, Artificial Sequence
  Description of Artificial Sequence: Synthetic oligonucleotide
gaaccgaacttgcccaggc

SEQ ID NO: 4615 - DNA, 19 bp, Artificial Sequence
  Description of Artificial Sequence: Synthetic oligonucleotide
aaccgaacttgcccaggct

SEQ ID NO: 4616 - DNA, 19 bp, Artificial Sequence
  Description of Artificial Sequence: Synthetic oligonucleotide
accgaacttgcccaggctt

SEQ ID NO: 4617 - DNA, 19 bp, Artificial Sequence
  Description of Artificial Sequence: Synthetic oligonucleotide
ccgaacttgcccaggcttc

SEQ ID NO: 4618 - DNA, 19 bp, Artificial Sequence
  Description of Artificial Sequence: Synthetic oligonucleotide
cgaacttgcccaggcttcc

SEQ ID NO: 4619 - DNA, 19 bp, Artificial Sequence
  Description of Artificial Sequence: Synthetic oligonucleotide
gaacttgcccaggcttcct

SEQ ID NO: 4620 - DNA, 19 bp, Artificial Sequence
  Description of Artificial Sequence: Synthetic oligonucleotide
aacttgcccaggcttcctg

SEQ ID NO: 4621 - DNA, 19 bp, Artificial Sequence
  Description of Artificial Sequence: Synthetic oligonucleotide
acttgcccaggcttcctgg

SEQ ID NO: 4622 - DNA, 19 bp, Artificial Sequence
  Description of Artificial Sequence: Synthetic oligonucleotide
cttgcccaggcttcctggc

SEQ ID NO: 4623 - DNA, 19 bp, Artificial Sequence
  Description of Artificial Sequence: Synthetic oligonucleotide
ttgcccaggcttcctggct

SEQ ID NO: 4624 - DNA, 19 bp, Artificial Sequence
  Description of Artificial Sequence: Synthetic oligonucleotide
tgcccaggcttcctggctc

SEQ ID NO: 4625 - DNA, 19 bp, Artificial Sequence
  Description of Artificial Sequence: Synthetic oligonucleotide
gcccaggcttcctggctcc

SEQ ID NO: 4626 - DNA, 19 bp, Artificial Sequence
  Description of Artificial Sequence: Synthetic oligonucleotide
cccaggcttcctggctcct

SEQ ID NO: 4627 - DNA, 19 bp, Artificial Sequence
  Description of Artificial Sequence: Synthetic oligonucleotide
ccaggcttcctggctcctg

SEQ ID NO: 4628 - DNA, 19 bp, Artificial Sequence
  Description of Artificial Sequence: Synthetic oligonucleotide
caggcttcctggctcctgg

SEQ ID NO: 4629 - DNA, 19 bp, Artificial Sequence
  Description of Artificial Sequence: Synthetic oligonucleotide
aggcttcctggctcctggt

SEQ ID NO: 4630 - DNA, 19 bp, Artificial Sequence
  Description of Artificial Sequence: Synthetic oligonucleotide
ggcttcctggctcctggtg

SEQ ID NO: 4631 - DNA, 19 bp, Artificial Sequence
  Description of Artificial Sequence: Synthetic oligonucleotide
gcttcctggctcctggtgg

SEQ ID NO: 4632 - DNA, 19 bp, Artificial Sequence
  Description of Artificial Sequence: Synthetic oligonucleotide
cttcctggctcctggtggt

SEQ ID NO: 4633 - DNA, 19 bp, Artificial Sequence
  Description of Artificial Sequence: Synthetic oligonucleotide
ttcctggctcctggtggtc

SEQ ID NO: 4634 - DNA, 19 bp, Artificial Sequence
  Description of Artificial Sequence: Synthetic oligonucleotide
tcctggctcctggtggtcc

SEQ ID NO: 4635 - DNA, 19 bp, Artificial Sequence
  Description of Artificial Sequence: Synthetic oligonucleotide
cctggctcctggtggtccc

SEQ ID NO: 4636 - DNA, 19 bp, Artificial Sequence
  Description of Artificial Sequence: Synthetic oligonucleotide
ctggctcctggtggtccct

SEQ ID NO: 4637 - DNA, 19 bp, Artificial Sequence
  Description of Artificial Sequence: Synthetic oligonucleotide
tggctcctggtggtccctg

SEQ ID NO: 4638 - DNA, 19 bp, Artificial Sequence
  Description of Artificial Sequence: Synthetic oligonucleotide
ggctcctggtggtccctgg

SEQ ID NO: 4639 - DNA, 19 bp, Artificial Sequence
  Description of Artificial Sequence: Synthetic oligonucleotide
gctcctggtggtccctggg

SEQ ID NO: 4640 - DNA, 19 bp, Artificial Sequence
  Description of Artificial Sequence: Synthetic oligonucleotide
ctcctggtggtccctgggt

SEQ ID NO: 4641 - DNA, 19 bp, Artificial Sequence
  Description of Artificial Sequence: Synthetic oligonucleotide
tcctggtggtccctgggta

SEQ ID NO: 4642 - DNA, 19 bp, Artificial Sequence
  Description of Artificial Sequence: Synthetic oligonucleotide
cctggtggtccctgggtac

SEQ ID NO: 4643 - DNA, 19 bp, Artificial Sequence
  Description of Artificial Sequence: Synthetic oligonucleotide
ctggtggtccctgggtaca

SEQ ID NO: 4644 - DNA, 19 bp, Artificial Sequence
  Description of Artificial Sequence: Synthetic oligonucleotide
tggtggtccctgggtacag

SEQ ID NO: 4645 - DNA, 19 bp, Artificial Sequence
  Description of Artificial Sequence: Synthetic oligonucleotide
ggtggtccctgggtacagg

SEQ ID NO: 4646 - DNA, 19 bp, Artificial Sequence
  Description of Artificial Sequence: Synthetic oligonucleotide
gtggtccctgggtacagga

SEQ ID NO: 4647 - DNA, 19 bp, Artificial Sequence
  Description of Artificial Sequence: Synthetic oligonucleotide
tggtccctgggtacaggac

SEQ ID NO: 4648 - DNA, 19 bp, Artificial Sequence
  Description of Artificial Sequence: Synthetic oligonucleotide
ggtccctgggtacaggacg

SEQ ID NO: 4649 - DNA, 19 bp, Artificial Sequence
  Description of Artificial Sequence: Synthetic oligonucleotide
gtccctgggtacaggacgt

SEQ ID NO: 4650 - DNA, 19 bp, Artificial Sequence
  Description of Artificial Sequence: Synthetic oligonucleotide
tccctgggtacaggacgta

SEQ ID NO: 4651 - DNA, 19 bp, Artificial Sequence
  Description of Artificial Sequence: Synthetic oligonucleotide
ccctgggtacaggacgtag

SEQ ID NO: 4652 - DNA, 19 bp, Artificial Sequence
  Description of Artificial Sequence: Synthetic oligonucleotide
cctgggtacaggacgtagc

SEQ ID NO: 4653 - DNA, 19 bp, Artificial Sequence
  Description of Artificial Sequence: Synthetic oligonucleotide
ctgggtacaggacgtagcc

SEQ ID NO: 4654 - DNA, 19 bp, Artificial Sequence
  Description of Artificial Sequence: Synthetic oligonucleotide
tgggtacaggacgtagcct

SEQ ID NO: 4655 - DNA, 19 bp, Artificial Sequence
  Description of Artificial Sequence: Synthetic oligonucleotide
gggtacaggacgtagccta

SEQ ID NO: 4656 - DNA, 19 bp, Artificial Sequence
  Description of Artificial Sequence: Synthetic oligonucleotide
ggtacaggacgtagcctat

SEQ ID NO: 4657 - DNA, 19 bp, Artificial Sequence
  Description of Artificial Sequence: Synthetic oligonucleotide
gtacaggacgtagcctatg

SEQ ID NO: 4658 - DNA, 19 bp, Artificial Sequence
  Description of Artificial Sequence: Synthetic oligonucleotide
tacaggacgtagcctatga

SEQ ID NO: 4659 - DNA, 19 bp, Artificial Sequence
  Description of Artificial Sequence: Synthetic oligonucleotide
acaggacgtagcctatgac

SEQ ID NO: 4660 - DNA, 19 bp, Artificial Sequence
  Description of Artificial Sequence: Synthetic oligonucleotide
caggacgtagcctatgacc

SEQ ID NO: 4661 - DNA, 19 bp, Artificial Sequence
  Description of Artificial Sequence: Synthetic oligonucleotide
aggacgtagcctatgacct

SEQ ID NO: 4662 - DNA, 19 bp, Artificial Sequence
  Description of Artificial Sequence: Synthetic oligonucleotide
ggacgtagcctatgacctg

SEQ ID NO: 4663 - DNA, 19 bp, Artificial Sequence
  Description of Artificial Sequence: Synthetic oligonucleotide
gacgtagcctatgacctgt

SEQ ID NO: 4664 - DNA, 19 bp, Artificial Sequence
  Description of Artificial Sequence: Synthetic oligonucleotide
acgtagcctatgacctgtg

SEQ ID NO: 4665 - DNA, 19 bp, Artificial Sequence
  Description of Artificial Sequence: Synthetic oligonucleotide
cgtagcctatgacctgtgg

SEQ ID NO: 4666 - DNA, 19 bp, Artificial Sequence
  Description of Artificial Sequence: Synthetic oligonucleotide
gtagcctatgacctgtggc

SEQ ID NO: 4667 - DNA, 19 bp, Artificial Sequence
  Description of Artificial Sequence: Synthetic oligonucleotide
tagcctatgacctgtggca

SEQ ID NO: 4668 - DNA, 19 bp, Artificial Sequence
  Description of Artificial Sequence: Synthetic oligonucleotide
agcctatgacctgtggcag

SEQ ID NO: 4669 - DNA, 19 bp, Artificial Sequence
  Description of Artificial Sequence: Synthetic oligonucleotide
gcctatgacctgtggcagg

SEQ ID NO: 4670 - DNA, 19 bp, Artificial Sequence
  Description of Artificial Sequence: Synthetic oligonucleotide
cctatgacctgtggcagga

SEQ ID NO: 4671 - DNA, 19 bp, Artificial Sequence
  Description of Artificial Sequence: Synthetic oligonucleotide
ctatgacctgtggcaggag

SEQ ID NO: 4672 - DNA, 19 bp, Artificial Sequence
  Description of Artificial Sequence: Synthetic oligonucleotide
tatgacctgtggcaggagg

SEQ ID NO: 4673 - DNA, 19 bp, Artificial Sequence
  Description of Artificial Sequence: Synthetic oligonucleotide
atgacctgtggcaggagga

SEQ ID NO: 4674 - DNA, 19 bp, Artificial Sequence
  Description of Artificial Sequence: Synthetic oligonucleotide
tgacctgtggcaggaggag

SEQ ID NO: 4675 - DNA, 19 bp, Artificial Sequence
  Description of Artificial Sequence: Synthetic oligonucleotide
gacctgtggcaggaggaga

SEQ ID NO: 4676 - DNA, 19 bp, Artificial Sequence
  Description of Artificial Sequence: Synthetic oligonucleotide
acctgtggcaggaggagag

SEQ ID NO: 4677 - DNA, 19 bp, Artificial Sequence
  Description of Artificial Sequence: Synthetic oligonucleotide
cctgtggcaggaggagagt

SEQ ID NO: 4678 - DNA, 19 bp, Artificial Sequence
  Description of Artificial Sequence: Synthetic oligonucleotide
ctgtggcaggaggagagta

SEQ ID NO: 4679 - DNA, 19 bp, Artificial Sequence
  Description of Artificial Sequence: Synthetic oligonucleotide
tgtggcaggaggagagtaa

SEQ ID NO: 4680 - DNA, 19 bp, Artificial Sequence
  Description of Artificial Sequence: Synthetic oligonucleotide
gtggcaggaggagagtaac

SEQ ID NO: 4681 - DNA, 19 bp, Artificial Sequence
  Description of Artificial Sequence: Synthetic oligonucleotide
tggcaggaggagagtaacc

SEQ ID NO: 4682 - DNA, 19 bp, Artificial Sequence
  Description of Artificial Sequence: Synthetic oligonucleotide
ggcaggaggagagtaacca

SEQ ID NO: 4683 - DNA, 19 bp, Artificial Sequence
  Description of Artificial Sequence: Synthetic oligonucleotide
gcaggaggagagtaaccac

SEQ ID NO: 4684 - DNA, 19 bp, Artificial Sequence
  Description of Artificial Sequence: Synthetic oligonucleotide
caggaggagagtaaccacg

SEQ ID NO: 4685 - DNA, 19 bp, Artificial Sequence
  Description of Artificial Sequence: Synthetic oligonucleotide
aggaggagagtaaccacga

SEQ ID NO: 4686 - DNA, 19 bp, Artificial Sequence
  Description of Artificial Sequence: Synthetic oligonucleotide
ggaggagagtaaccacgag

SEQ ID NO: 4687 - DNA, 19 bp, Artificial Sequence
  Description of Artificial Sequence: Synthetic oligonucleotide
gaggagagtaaccacgagt

SEQ ID NO: 4688 - DNA, 19 bp, Artificial Sequence
  Description of Artificial Sequence: Synthetic oligonucleotide
aggagagtaaccacgagtg

SEQ ID NO: 4689 - DNA, 19 bp, Artificial Sequence
  Description of Artificial Sequence: Synthetic oligonucleotide
ggagagtaaccacgagtgc

SEQ ID NO: 4690 - DNA, 19 bp, Artificial Sequence
  Description of Artificial Sequence: Synthetic oligonucleotide
gagagtaaccacgagtgca

SEQ ID NO: 4691 - DNA, 19 bp, Artificial Sequence
  Description of Artificial Sequence: Synthetic oligonucleotide
agagtaaccacgagtgcac

SEQ ID NO: 4692 - DNA, 19 bp, Artificial Sequence
  Description of Artificial Sequence: Synthetic oligonucleotide
gagtaaccacgagtgcacc

SEQ ID NO: 4693 - DNA, 19 bp, Artificial Sequence
  Description of Artificial Sequence: Synthetic oligonucleotide
agtaaccacgagtgcacca

SEQ ID NO: 4694 - DNA, 19 bp, Artificial Sequence
  Description of Artificial Sequence: Synthetic oligonucleotide
gtaaccacgagtgcaccaa

SEQ ID NO: 4695 - DNA, 19 bp, Artificial Sequence
  Description of Artificial Sequence: Synthetic oligonucleotide
taaccacgagtgcaccaag

SEQ ID NO: 4696 - DNA, 19 bp, Artificial Sequence
  Description of Artificial Sequence: Synthetic oligonucleotide
aaccacgagtgcaccaagg

SEQ ID NO: 4697 - DNA, 19 bp, Artificial Sequence
  Description of Artificial Sequence: Synthetic oligonucleotide
accacgagtgcaccaaggc

SEQ ID NO: 4698 - DNA, 19 bp, Artificial Sequence
  Description of Artificial Sequence: Synthetic oligonucleotide
ccacgagtgcaccaaggct

SEQ ID NO: 4699 - DNA, 19 bp, Artificial Sequence
  Description of Artificial Sequence: Synthetic oligonucleotide
cacgagtgcaccaaggctg

SEQ ID NO: 4700 - DNA, 19 bp, Artificial Sequence
  Description of Artificial Sequence: Synthetic oligonucleotide
acgagtgcaccaaggctgt

SEQ ID NO: 4701 - DNA, 19 bp, Artificial Sequence
  Description of Artificial Sequence: Synthetic oligonucleotide
cgagtgcaccaaggctgtg

SEQ ID NO: 4702 - DNA, 19 bp, Artificial Sequence
  Description of Artificial Sequence: Synthetic oligonucleotide
gagtgcaccaaggctgtga

SEQ ID NO: 4703 - DNA, 19 bp, Artificial Sequence
  Description of Artificial Sequence: Synthetic oligonucleotide
agtgcaccaaggctgtgaa

SEQ ID NO: 4704 - DNA, 19 bp, Artificial Sequence
  Description of Artificial Sequence: Synthetic oligonucleotide
gtgcaccaaggctgtgaac

SEQ ID NO: 4705 - DNA, 19 bp, Artificial Sequence
  Description of Artificial Sequence: Synthetic oligonucleotide
tgcaccaaggctgtgaact

SEQ ID NO: 4706 - DNA, 19 bp, Artificial Sequence
  Description of Artificial Sequence: Synthetic oligonucleotide
gcaccaaggctgtgaactt

SEQ ID NO: 4707 - DNA, 19 bp, Artificial Sequence
  Description of Artificial Sequence: Synthetic oligonucleotide
caccaaggctgtgaacttt

SEQ ID NO: 4708 - DNA, 19 bp, Artificial Sequence
  Description of Artificial Sequence: Synthetic oligonucleotide
accaaggctgtgaactttg

SEQ ID NO: 4709 - DNA, 19 bp, Artificial Sequence
  Description of Artificial Sequence: Synthetic oligonucleotide
ccaaggctgtgaactttgc

SEQ ID NO: 4710 - DNA, 19 bp, Artificial Sequence
  Description of Artificial Sequence: Synthetic oligonucleotide
caaggctgtgaactttgcc

SEQ ID NO: 4711 - DNA, 19 bp, Artificial Sequence
  Description of Artificial Sequence: Synthetic oligonucleotide
aaggctgtgaactttgcca

SEQ ID NO: 4712 - DNA, 19 bp, Artificial Sequence
  Description of Artificial Sequence: Synthetic oligonucleotide
aggctgtgaactttgccat

SEQ ID NO: 4713 - DNA, 19 bp, Artificial Sequence
  Description of Artificial Sequence: Synthetic oligonucleotide
ggctgtgaactttgccatg

SEQ ID NO: 4714 - DNA, 19 bp, Artificial Sequence
  Description of Artificial Sequence: Synthetic oligonucleotide
gctgtgaactttgccatgc

SEQ ID NO: 4715 - DNA, 19 bp, Artificial Sequence
  Description of Artificial Sequence: Synthetic oligonucleotide
ctgtgaactttgccatgca

SEQ ID NO: 4716 - DNA, 19 bp, Artificial Sequence
  Description of Artificial Sequence: Synthetic oligonucleotide
tgtgaactttgccatgcac

SEQ ID NO: 4717 - DNA, 19 bp, Artificial Sequence
  Description of Artificial Sequence: Synthetic oligonucleotide
gtgaactttgccatgcacg

SEQ ID NO: 4718 - DNA, 19 bp, Artificial Sequence
  Description of Artificial Sequence: Synthetic oligonucleotide
tgaactttgccatgcacga

SEQ ID NO: 4719 - DNA, 19 bp, Artificial Sequence
  Description of Artificial Sequence: Synthetic oligonucleotide
gaactttgccatgcacgag

SEQ ID NO: 4720 - DNA, 19 bp, Artificial Sequence
  Description of Artificial Sequence: Synthetic oligonucleotide
aactttgccatgcacgagc

SEQ ID NO: 4721 - DNA, 19 bp, Artificial Sequence
  Description of Artificial Sequence: Synthetic oligonucleotide
actttgccatgcacgagct

SEQ ID NO: 4722 - DNA, 19 bp, Artificial Sequence
  Description of Artificial Sequence: Synthetic oligonucleotide
ctttgccatgcacgagctg

SEQ ID NO: 4723 - DNA, 19 bp, Artificial Sequence
  Description of Artificial Sequence: Synthetic oligonucleotide
tttgccatgcacgagctgc

SEQ ID NO: 4724 - DNA, 19 bp, Artificial Sequence
  Description of Artificial Sequence: Synthetic oligonucleotide
ttgccatgcacgagctgca

SEQ ID NO: 4725 - DNA, 19 bp, Artificial Sequence
  Description of Artificial Sequence: Synthetic oligonucleotide
tgccatgcacgagctgcag

SEQ ID NO: 4726 - DNA, 19 bp, Artificial Sequence
  Description of Artificial Sequence: Synthetic oligonucleotide
gccatgcacgagctgcagc

SEQ ID NO: 4727 - DNA, 19 bp, Artificial Sequence
  Description of Artificial Sequence: Synthetic oligonucleotide
ccatgcacgagctgcagct

SEQ ID NO: 4728 - DNA, 19 bp, Artificial Sequence
  Description of Artificial Sequence: Synthetic oligonucleotide
catgcacgagctgcagctc

SEQ ID NO: 4729 - DNA, 19 bp, Artificial Sequence
  Description of Artificial Sequence: Synthetic oligonucleotide
atgcacgagctgcagctca

SEQ ID NO: 4730 - DNA, 19 bp, Artificial Sequence
  Description of Artificial Sequence: Synthetic oligonucleotide
tgcacgagctgcagctcat

SEQ ID NO: 4731 - DNA, 19 bp, Artificial Sequence
  Description of Artificial Sequence: Synthetic oligonucleotide
gcacgagctgcagctcatc

SEQ ID NO: 4732 - DNA, 19 bp, Artificial Sequence
  Description of Artificial Sequence: Synthetic oligonucleotide
cacgagctgcagctcatcc

SEQ ID NO: 4733 - DNA, 19 bp, Artificial Sequence
  Description of Artificial Sequence: Synthetic oligonucleotide
acgagctgcagctcatccg

SEQ ID NO: 4734 - DNA, 19 bp, Artificial Sequence
  Description of Artificial Sequence: Synthetic oligonucleotide
cgagctgcagctcatccgt

SEQ ID NO: 4735 - DNA, 19 bp, Artificial Sequence
  Description of Artificial Sequence: Synthetic oligonucleotide
gagctgcagctcatccgtg

SEQ ID NO: 4736 - DNA, 19 bp, Artificial Sequence
  Description of Artificial Sequence: Synthetic oligonucleotide
agctgcagctcatccgtgt

SEQ ID NO: 4737 - DNA, 19 bp, Artificial Sequence
  Description of Artificial Sequence: Synthetic oligonucleotide
gctgcagctcatccgtgtg

SEQ ID NO: 4738 - DNA, 19 bp, Artificial Sequence
  Description of Artificial Sequence: Synthetic oligonucleotide
ctgcagctcatccgtgtgg

SEQ ID NO: 4739 - DNA, 19 bp, Artificial Sequence
  Description of Artificial Sequence: Synthetic oligonucleotide
tgcagctcatccgtgtgga

SEQ ID NO: 4740 - DNA, 19 bp, Artificial Sequence
  Description of Artificial Sequence: Synthetic oligonucleotide
gcagctcatccgtgtggag

SEQ ID NO: 4741 - DNA, 19 bp, Artificial Sequence
  Description of Artificial Sequence: Synthetic oligonucleotide
cagctcatccgtgtggaga

SEQ ID NO: 4742 - DNA, 19 bp, Artificial Sequence
  Description of Artificial Sequence: Synthetic oligonucleotide
agctcatccgtgtggagaa

SEQ ID NO: 4743 - DNA, 19 bp, Artificial Sequence
  Description of Artificial Sequence: Synthetic oligonucleotide
gctcatccgtgtggagaag

SEQ ID NO: 4744 - DNA, 19 bp, Artificial Sequence
  Description of Artificial Sequence: Synthetic oligonucleotide
ctcatccgtgtggagaagc

SEQ ID NO: 4745 - DNA, 19 bp, Artificial Sequence
  Description of Artificial Sequence: Synthetic oligonucleotide
tcatccgtgtggagaagca

SEQ ID NO: 4746 - DNA, 19 bp, Artificial Sequence
  Description of Artificial Sequence: Synthetic oligonucleotide
catccgtgtggagaagcag

SEQ ID NO: 4747 - DNA, 19 bp, Artificial Sequence
  Description of Artificial Sequence: Synthetic oligonucleotide
atccgtgtggagaagcagt

SEQ ID NO: 4748 - DNA, 19 bp, Artificial Sequence
  Description of Artificial Sequence: Synthetic oligonucleotide
tccgtgtggagaagcagta

SEQ ID NO: 4749 - DNA, 19 bp, Artificial Sequence
  Description of Artificial Sequence: Synthetic oligonucleotide
ccgtgtggagaagcagtat

SEQ ID NO: 4750 - DNA, 19 bp, Artificial Sequence
  Description of Artificial Sequence: Synthetic oligonucleotide
cgtgtggagaagcagtatc

SEQ ID NO: 4751 - DNA, 19 bp, Artificial Sequence
  Description of Artificial Sequence: Synthetic oligonucleotide
gtgtggagaagcagtatcc

SEQ ID NO: 4752 - DNA, 19 bp, Artificial Sequence
  Description of Artificial Sequence: Synthetic oligonucleotide
tgtggagaagcagtatccc

SEQ ID NO: 4753 - DNA, 19 bp, Artificial Sequence
  Description of Artificial Sequence: Synthetic oligonucleotide
gtggagaagcagtatcccc

SEQ ID NO: 4754 - DNA, 19 bp, Artificial Sequence
  Description of Artificial Sequence: Synthetic oligonucleotide
tggagaagcagtatcccca

SEQ ID NO: 4755 - DNA, 19 bp, Artificial Sequence
  Description of Artificial Sequence: Synthetic oligonucleotide
ggagaagcagtatccccac

SEQ ID NO: 4756 - DNA, 19 bp, Artificial Sequence
  Description of Artificial Sequence: Synthetic oligonucleotide
gagaagcagtatccccacc

SEQ ID NO: 4757 - DNA, 19 bp, Artificial Sequence
  Description of Artificial Sequence: Synthetic oligonucleotide
agaagcagtatccccacca

SEQ ID NO: 4758 - DNA, 19 bp, Artificial Sequence
  Description of Artificial Sequence: Synthetic oligonucleotide
gaagcagtatccccaccac

SEQ ID NO: 4759 - DNA, 19 bp, Artificial Sequence
  Description of Artificial Sequence: Synthetic oligonucleotide
aagcagtatccccaccaca

SEQ ID NO: 4760 - DNA, 19 bp, Artificial Sequence
  Description of Artificial Sequence: Synthetic oligonucleotide
agcagtatccccaccacag

SEQ ID NO: 4761 - DNA, 19 bp, Artificial Sequence
  Description of Artificial Sequence: Synthetic oligonucleotide
gcagtatccccaccacagc

SEQ ID NO: 4762 - DNA, 19 bp, Artificial Sequence
  Description of Artificial Sequence: Synthetic oligonucleotide
cagtatccccaccacagcc

SEQ ID NO: 4763 - DNA, 19 bp, Artificial Sequence
  Description of Artificial Sequence: Synthetic oligonucleotide
agtatccccaccacagcct

SEQ ID NO: 4764 - DNA, 19 bp, Artificial Sequence
  Description of Artificial Sequence: Synthetic oligonucleotide
gtatccccaccacagcctg

SEQ ID NO: 4765 - DNA, 19 bp, Artificial Sequence
  Description of Artificial Sequence: Synthetic oligonucleotide
tatccccaccacagcctgg

SEQ ID NO: 4766 - DNA, 19 bp, Artificial Sequence
  Description of Artificial Sequence: Synthetic oligonucleotide
atccccaccacagcctgga

SEQ ID NO: 4767 - DNA, 19 bp, Artificial Sequence
  Description of Artificial Sequence: Synthetic oligonucleotide
tccccaccacagcctggac

SEQ ID NO: 4768 - DNA, 19 bp, Artificial Sequence
  Description of Artificial Sequence: Synthetic oligonucleotide
ccccaccacagcctggacc

SEQ ID NO: 4769 - DNA, 19 bp, Artificial Sequence
  Description of Artificial Sequence: Synthetic oligonucleotide
cccaccacagcctggacca

SEQ ID NO: 4770 - DNA, 19 bp, Artificial Sequence
  Description of Artificial Sequence: Synthetic oligonucleotide
ccaccacagcctggaccac

SEQ ID NO: 4771 - DNA, 19 bp, Artificial Sequence
  Description of Artificial Sequence: Synthetic oligonucleotide
caccacagcctggaccacc

SEQ ID NO: 4772 - DNA, 19 bp, Artificial Sequence
  Description of Artificial Sequence: Synthetic oligonucleotide
accacagcctggaccacct

SEQ ID NO: 4773 - DNA, 19 bp, Artificial Sequence
  Description of Artificial Sequence: Synthetic oligonucleotide
ccacagcctggaccacctg

SEQ ID NO: 4774 - DNA, 19 bp, Artificial Sequence
  Description of Artificial Sequence: Synthetic oligonucleotide
cacagcctggaccacctgg

SEQ ID NO: 4775 - DNA, 19 bp, Artificial Sequence
  Description of Artificial Sequence: Synthetic oligonucleotide
acagcctggaccacctggt

SEQ ID NO: 4776 - DNA, 19 bp, Artificial Sequence
  Description of Artificial Sequence: Synthetic oligonucleotide
cagcctggaccacctggtg

SEQ ID NO: 4777 - DNA, 19 bp, Artificial Sequence
  Description of Artificial Sequence: Synthetic oligonucleotide
agcctggaccacctggtgg

SEQ ID NO: 4778 - DNA, 19 bp, Artificial Sequence
  Description of Artificial Sequence: Synthetic oligonucleotide
gcctggaccacctggtgga

SEQ ID NO: 4779 - DNA, 19 bp, Artificial Sequence
  Description of Artificial Sequence: Synthetic oligonucleotide
cctggaccacctggtggag

SEQ ID NO: 4780 - DNA, 19 bp, Artificial Sequence
  Description of Artificial Sequence: Synthetic oligonucleotide
ctggaccacctggtggagg

SEQ ID NO: 4781 - DNA, 19 bp, Artificial Sequence
  Description of Artificial Sequence: Synthetic oligonucleotide
tggaccacctggtggagga

SEQ ID NO: 4782 - DNA, 19 bp, Artificial Sequence
  Description of Artificial Sequence: Synthetic oligonucleotide
ggaccacctggtggaggag

SEQ ID NO: 4783 - DNA, 19 bp, Artificial Sequence
  Description of Artificial Sequence: Synthetic oligonucleotide
gaccacctggtggaggagc

SEQ ID NO: 4784 - DNA, 19 bp, Artificial Sequence
  Description of Artificial Sequence: Synthetic oligonucleotide
accacctggtggaggagct

SEQ ID NO: 4785 - DNA, 19 bp, Artificial Sequence
  Description of Artificial Sequence: Synthetic oligonucleotide
ccacctggtggaggagctc

SEQ ID NO: 4786 - DNA, 19 bp, Artificial Sequence
  Description of Artificial Sequence: Synthetic oligonucleotide
cacctggtggaggagctct

SEQ ID NO: 4787 - DNA, 19 bp, Artificial Sequence
  Description of Artificial Sequence: Synthetic oligonucleotide
acctggtggaggagctctt

SEQ ID NO: 4788 - DNA, 19 bp, Artificial Sequence
  Description of Artificial Sequence: Synthetic oligonucleotide
cctggtggaggagctcttc

SEQ ID NO: 4789 - DNA, 19 bp, Artificial Sequence
  Description of Artificial Sequence: Synthetic oligonucleotide
ctggtggaggagctcttcc

SEQ ID NO: 4790 - DNA, 19 bp, Artificial Sequence
  Description of Artificial Sequence: Synthetic oligonucleotide
tggtggaggagctcttcct

SEQ ID NO: 4791 - DNA, 19 bp, Artificial Sequence
  Description of Artificial Sequence: Synthetic oligonucleotide
ggtggaggagctcttcctg

SEQ ID NO: 4792 - DNA, 19 bp, Artificial Sequence
  Description of Artificial Sequence: Synthetic oligonucleotide
gtggaggagctcttcctgg

SEQ ID NO: 4793 - DNA, 19 bp, Artificial Sequence
  Description of Artificial Sequence: Synthetic oligonucleotide
tggaggagctcttcctggg

SEQ ID NO: 4794 - DNA, 19 bp, Artificial Sequence
  Description of Artificial Sequence: Synthetic oligonucleotide
ggaggagctcttcctgggc

SEQ ID NO: 4795 - DNA, 19 bp, Artificial Sequence
  Description of Artificial Sequence: Synthetic oligonucleotide
gaggagctcttcctgggcg

SEQ ID NO: 4796 - DNA, 19 bp, Artificial Sequence
  Description of Artificial Sequence: Synthetic oligonucleotide
aggagctcttcctgggcga

SEQ ID NO: 4797 - DNA, 19 bp, Artificial Sequence
  Description of Artificial Sequence: Synthetic oligonucleotide
ggagctcttcctgggcgac

SEQ ID NO: 4798 - DNA, 19 bp, Artificial Sequence
  Description of Artificial Sequence: Synthetic oligonucleotide
gagctcttcctgggcgaca

SEQ ID NO: 4799 - DNA, 19 bp, Artificial Sequence
  Description of Artificial Sequence: Synthetic oligonucleotide
agctcttcctgggcgacat

SEQ ID NO: 4800 - DNA, 19 bp, Artificial Sequence
  Description of Artificial Sequence: Synthetic oligonucleotide
gctcttcctgggcgacatc

SEQ ID NO: 4801 - DNA, 19 bp, Artificial Sequence
  Description of Artificial Sequence: Synthetic oligonucleotide
ctcttcctgggcgacatcc

SEQ ID NO: 4802 - DNA, 19 bp, Artificial Sequence
  Description of Artificial Sequence: Synthetic oligonucleotide
tcttcctgggcgacatcca

SEQ ID NO: 4803 - DNA, 19 bp, Artificial Sequence
  Description of Artificial Sequence: Synthetic oligonucleotide
cttcctgggcgacatccac

SEQ ID NO: 4804 - DNA, 19 bp, Artificial Sequence
  Description of Artificial Sequence: Synthetic oligonucleotide
ttcctgggcgacatccaca

SEQ ID NO: 4805 - DNA, 19 bp, Artificial Sequence
  Description of Artificial Sequence: Synthetic oligonucleotide
tcctgggcgacatccacac

SEQ ID NO: 4806 - DNA, 19 bp, Artificial Sequence
  Description of Artificial Sequence: Synthetic oligonucleotide
cctgggcgacatccacacg

SEQ ID NO: 4807 - DNA, 19 bp, Artificial Sequence
  Description of Artificial Sequence: Synthetic oligonucleotide
ctgggcgacatccacacgg

SEQ ID NO: 4808 - DNA, 19 bp, Artificial Sequence
  Description of Artificial Sequence: Synthetic oligonucleotide
tgggcgacatccacacgga

SEQ ID NO: 4809 - DNA, 19 bp, Artificial Sequence
  Description of Artificial Sequence: Synthetic oligonucleotide
gggcgacatccacacggac

SEQ ID NO: 4810 - DNA, 19 bp, Artificial Sequence
  Description of Artificial Sequence: Synthetic oligonucleotide
ggcgacatccacacggacg

SEQ ID NO: 4811 - DNA, 19 bp, Artificial Sequence
  Description of Artificial Sequence: Synthetic oligonucleotide
gcgacatccacacggacgc

SEQ ID NO: 4812 - DNA, 19 bp, Artificial Sequence
  Description of Artificial Sequence: Synthetic oligonucleotide
cgacatccacacggacgct

SEQ ID NO: 4813 - DNA, 19 bp, Artificial Sequence
  Description of Artificial Sequence: Synthetic oligonucleotide
gacatccacacggacgcta

SEQ ID NO: 4814 - DNA, 19 bp, Artificial Sequence
  Description of Artificial Sequence: Synthetic oligonucleotide
acatccacacggacgctac

SEQ ID NO: 4815 - DNA, 19 bp, Artificial Sequence
  Description of Artificial Sequence: Synthetic oligonucleotide
catccacacggacgctacc

SEQ ID NO: 4816 - DNA, 19 bp, Artificial Sequence
  Description of Artificial Sequence: Synthetic oligonucleotide
atccacacggacgctaccc

SEQ ID NO: 4817 - DNA, 19 bp, Artificial Sequence
  Description of Artificial Sequence: Synthetic oligonucleotide
tccacacggacgctaccca

SEQ ID NO: 4818 - DNA, 19 bp, Artificial Sequence
  Description of Artificial Sequence: Synthetic oligonucleotide
ccacacggacgctacccag

SEQ ID NO: 4819 - DNA, 19 bp, Artificial Sequence
  Description of Artificial Sequence: Synthetic oligonucleotide
cacacggacgctacccaga

SEQ ID NO: 4820 - DNA, 19 bp, Artificial Sequence
  Description of Artificial Sequence: Synthetic oligonucleotide
acacggacgctacccagag

SEQ ID NO: 4821 - DNA, 19 bp, Artificial Sequence
  Description of Artificial Sequence: Synthetic oligonucleotide
cacggacgctacccagagg

SEQ ID NO: 4822 - DNA, 19 bp, Artificial Sequence
  Description of Artificial Sequence: Synthetic oligonucleotide
acggacgctacccagaggg

SEQ ID NO: 4823 - DNA, 19 bp, Artificial Sequence
  Description of Artificial Sequence: Synthetic oligonucleotide
cggacgctacccagagggt

SEQ ID NO: 4824 - DNA, 19 bp, Artificial Sequence
  Description of Artificial Sequence: Synthetic oligonucleotide
ggacgctacccagagggtg

SEQ ID NO: 4825 - DNA, 19 bp, Artificial Sequence
  Description of Artificial Sequence: Synthetic oligonucleotide
gacgctacccagagggtgt

SEQ ID NO: 4826 - DNA, 19 bp, Artificial Sequence
  Description of Artificial Sequence: Synthetic oligonucleotide
acgctacccagagggtgtt

SEQ ID NO: 4827 - DNA, 19 bp, Artificial Sequence
  Description of Artificial Sequence: Synthetic oligonucleotide
cgctacccagagggtgttc

SEQ ID NO: 4828 - DNA, 19 bp, Artificial Sequence
  Description of Artificial Sequence: Synthetic oligonucleotide
gctacccagagggtgttct

SEQ ID NO: 4829 - DNA, 19 bp, Artificial Sequence
  Description of Artificial Sequence: Synthetic oligonucleotide
ctacccagagggtgttcta

SEQ ID NO: 4830 - DNA, 19 bp, Artificial Sequence
  Description of Artificial Sequence: Synthetic oligonucleotide
tacccagagggtgttctac

SEQ ID NO: 4831 - DNA, 19 bp, Artificial Sequence
  Description of Artificial Sequence: Synthetic oligonucleotide
acccagagggtgttctacc

SEQ ID NO: 4832 - DNA, 19 bp, Artificial Sequence
  Description of Artificial Sequence: Synthetic oligonucleotide
cccagagggtgttctaccg

SEQ ID NO: 4833 - DNA, 19 bp, Artificial Sequence
  Description of Artificial Sequence: Synthetic oligonucleotide
ccagagggtgttctaccgg

SEQ ID NO: 4834 - DNA, 19 bp, Artificial Sequence
  Description of Artificial Sequence: Synthetic oligonucleotide
cagagggtgttctaccggc

SEQ ID NO: 4835 - DNA, 19 bp, Artificial Sequence
  Description of Artificial Sequence: Synthetic oligonucleotide
agagggtgttctaccggcc

SEQ ID NO: 4836 - DNA, 19 bp, Artificial Sequence
  Description of Artificial Sequence: Synthetic oligonucleotide
gagggtgttctaccggccg

SEQ ID NO: 4837 - DNA, 19 bp, Artificial Sequence
  Description of Artificial Sequence: Synthetic oligonucleotide
agggtgttctaccggccgt

SEQ ID NO: 4838 - DNA, 19 bp, Artificial Sequence
  Description of Artificial Sequence: Synthetic oligonucleotide
gggtgttctaccggccgtc

SEQ ID NO: 4839 - DNA, 19 bp, Artificial Sequence
  Description of Artificial Sequence: Synthetic oligonucleotide
ggtgttctaccggccgtcc

SEQ ID NO: 4840 - DNA, 19 bp, Artificial Sequence
  Description of Artificial Sequence: Synthetic oligonucleotide
gtgttctaccggccgtcca

SEQ ID NO: 4841 - DNA, 19 bp, Artificial Sequence
  Description of Artificial Sequence: Synthetic oligonucleotide
tgttctaccggccgtccag

SEQ ID NO: 4842 - DNA, 19 bp, Artificial Sequence
  Description of Artificial Sequence: Synthetic oligonucleotide
gttctaccggccgtccagt

SEQ ID NO: 4843 - DNA, 19 bp, Artificial Sequence
  Description of Artificial Sequence: Synthetic oligonucleotide
ttctaccggccgtccagtt

SEQ ID NO: 4844 - DNA, 19 bp, Artificial Sequence
  Description of Artificial Sequence: Synthetic oligonucleotide
tctaccggccgtccagtta

SEQ ID NO: 4845 - DNA, 19 bp, Artificial Sequence
  Description of Artificial Sequence: Synthetic oligonucleotide
ctaccggccgtccagttac

SEQ ID NO: 4846 - DNA, 19 bp, Artificial Sequence
  Description of Artificial Sequence: Synthetic oligonucleotide
taccggccgtccagttacc

SEQ ID NO: 4847 - DNA, 19 bp, Artificial Sequence
  Description of Artificial Sequence: Synthetic oligonucleotide
accggccgtccagttacca

SEQ ID NO: 4848 - DNA, 19 bp, Artificial Sequence
  Description of Artificial Sequence: Synthetic oligonucleotide
ccggccgtccagttaccag

SEQ ID NO: 4849 - DNA, 19 bp, Artificial Sequence
  Description of Artificial Sequence: Synthetic oligonucleotide
cggccgtccagttaccagc

SEQ ID NO: 4850 - DNA, 19 bp, Artificial Sequence
  Description of Artificial Sequence: Synthetic oligonucleotide
ggccgtccagttaccagcc

SEQ ID NO: 4851 - DNA, 19 bp, Artificial Sequence
  Description of Artificial Sequence: Synthetic oligonucleotide
gccgtccagttaccagccg

SEQ ID NO: 4852 - DNA, 19 bp, Artificial Sequence
  Description of Artificial Sequence: Synthetic oligonucleotide
ccgtccagttaccagccgc

SEQ ID NO: 4853 - DNA, 19 bp, Artificial Sequence
  Description of Artificial Sequence: Synthetic oligonucleotide
cgtccagttaccagccgcc

SEQ ID NO: 4854 - DNA, 19 bp, Artificial Sequence
  Description of Artificial Sequence: Synthetic oligonucleotide
gtccagttaccagccgccc

SEQ ID NO: 4855 - DNA, 19 bp, Artificial Sequence
  Description of Artificial Sequence: Synthetic oligonucleotide
tccagttaccagccgcccc

SEQ ID NO: 4856 - DNA, 19 bp, Artificial Sequence
  Description of Artificial Sequence: Synthetic oligonucleotide
ccagttaccagccgcccct

SEQ ID NO: 4857 - DNA, 19 bp, Artificial Sequence
  Description of Artificial Sequence: Synthetic oligonucleotide
cagttaccagccgcccctg

SEQ ID NO: 4858 - DNA, 19 bp, Artificial Sequence
  Description of Artificial Sequence: Synthetic oligonucleotide
agttaccagccgcccctgc

SEQ ID NO: 4859 - DNA, 19 bp, Artificial Sequence
  Description of Artificial Sequence: Synthetic oligonucleotide
gttaccagccgcccctgca

SEQ ID NO: 4860 - DNA, 19 bp, Artificial Sequence
  Description of Artificial Sequence: Synthetic oligonucleotide
ttaccagccgcccctgcag

SEQ ID NO: 4861 - DNA, 19 bp, Artificial Sequence
  Description of Artificial Sequence: Synthetic oligonucleotide
taccagccgcccctgcaga

SEQ ID NO: 4862 - DNA, 19 bp, Artificial Sequence
  Description of Artificial Sequence: Synthetic oligonucleotide
accagccgcccctgcagaa

SEQ ID NO: 4863 - DNA, 19 bp, Artificial Sequence
  Description of Artificial Sequence: Synthetic oligonucleotide
ccagccgcccctgcagaat

SEQ ID NO: 4864 - DNA, 19 bp, Artificial Sequence
  Description of Artificial Sequence: Synthetic oligonucleotide
cagccgcccctgcagaatg

SEQ ID NO: 4865 - DNA, 19 bp, Artificial Sequence
  Description of Artificial Sequence: Synthetic oligonucleotide
agccgcccctgcagaatgc

SEQ ID NO: 4866 - DNA, 19 bp, Artificial Sequence
  Description of Artificial Sequence: Synthetic oligonucleotide
gccgcccctgcagaatgcc

SEQ ID NO: 4867 - DNA, 19 bp, Artificial Sequence
  Description of Artificial Sequence: Synthetic oligonucleotide
ccgcccctgcagaatgcca

SEQ ID NO: 4868 - DNA, 19 bp, Artificial Sequence
  Description of Artificial Sequence: Synthetic oligonucleotide
cgcccctgcagaatgccaa

SEQ ID NO: 4869 - DNA, 19 bp, Artificial Sequence
  Description of Artificial Sequence: Synthetic oligonucleotide
gcccctgcagaatgccaag

SEQ ID NO: 4870 - DNA, 19 bp, Artificial Sequence
  Description of Artificial Sequence: Synthetic oligonucleotide
cccctgcagaatgccaaga

SEQ ID NO: 4871 - DNA, 19 bp, Artificial Sequence
  Description of Artificial Sequence: Synthetic oligonucleotide
ccctgcagaatgccaagaa

SEQ ID NO: 4872 - DNA, 19 bp, Artificial Sequence
  Description of Artificial Sequence: Synthetic oligonucleotide
cctgcagaatgccaagaac

SEQ ID NO: 4873 - DNA, 19 bp, Artificial Sequence
  Description of Artificial Sequence: Synthetic oligonucleotide
ctgcagaatgccaagaacc

SEQ ID NO: 4874 - DNA, 19 bp, Artificial Sequence
  Description of Artificial Sequence: Synthetic oligonucleotide
tgcagaatgccaagaacca

SEQ ID NO: 4875 - DNA, 19 bp, Artificial Sequence
  Description of Artificial Sequence: Synthetic oligonucleotide
gcagaatgccaagaaccac

SEQ ID NO: 4876 - DNA, 19 bp, Artificial Sequence
  Description of Artificial Sequence: Synthetic oligonucleotide
cagaatgccaagaaccaca

SEQ ID NO: 4877 - DNA, 19 bp, Artificial Sequence
  Description of Artificial Sequence: Synthetic oligonucleotide
agaatgccaagaaccacaa

SEQ ID NO: 4878 - DNA, 19 bp, Artificial Sequence
  Description of Artificial Sequence: Synthetic oligonucleotide
gaatgccaagaaccacaac

SEQ ID NO: 4879 - DNA, 19 bp, Artificial Sequence
  Description of Artificial Sequence: Synthetic oligonucleotide
aatgccaagaaccacaacc

SEQ ID NO: 4880 - DNA, 19 bp, Artificial Sequence
  Description of Artificial Sequence: Synthetic oligonucleotide
atgccaagaaccacaacca

SEQ ID NO: 4881 - DNA, 19 bp, Artificial Sequence
  Description of Artificial Sequence: Synthetic oligonucleotide
tgccaagaaccacaaccat

SEQ ID NO: 4882 - DNA, 19 bp, Artificial Sequence
  Description of Artificial Sequence: Synthetic oligonucleotide
gccaagaaccacaaccatg

SEQ ID NO: 4883 - DNA, 19 bp, Artificial Sequence
  Description of Artificial Sequence: Synthetic oligonucleotide
ccaagaaccacaaccatgc

SEQ ID NO: 4884 - DNA, 19 bp, Artificial Sequence
  Description of Artificial Sequence: Synthetic oligonucleotide
caagaaccacaaccatgcg

SEQ ID NO: 4885 - DNA, 19 bp, Artificial Sequence
  Description of Artificial Sequence: Synthetic oligonucleotide
aagaaccacaaccatgcgt

SEQ ID NO: 4886 - DNA, 19 bp, Artificial Sequence
  Description of Artificial Sequence: Synthetic oligonucleotide
agaaccacaaccatgcgtg

SEQ ID NO: 4887 - DNA, 19 bp, Artificial Sequence
  Description of Artificial Sequence: Synthetic oligonucleotide
gaaccacaaccatgcgtgc

SEQ ID NO: 4888 - DNA, 19 bp, Artificial Sequence
  Description of Artificial Sequence: Synthetic oligonucleotide
aaccacaaccatgcgtgca

SEQ ID NO: 4889 - DNA, 19 bp, Artificial Sequence
  Description of Artificial Sequence: Synthetic oligonucleotide
accacaaccatgcgtgcat

SEQ ID NO: 4890 - DNA, 19 bp, Artificial Sequence
  Description of Artificial Sequence: Synthetic oligonucleotide
ccacaaccatgcgtgcata

SEQ ID NO: 4891 - DNA, 19 bp, Artificial Sequence
  Description of Artificial Sequence: Synthetic oligonucleotide
cacaaccatgcgtgcatag

SEQ ID NO: 4892 - DNA, 19 bp, Artificial Sequence
  Description of Artificial Sequence: Synthetic oligonucleotide
acaaccatgcgtgcatagc

SEQ ID NO: 4893 - DNA, 19 bp, Artificial Sequence
  Description of Artificial Sequence: Synthetic oligonucleotide
caaccatgcgtgcatagcc

SEQ ID NO: 4894 - DNA, 19 bp, Artificial Sequence
  Description of Artificial Sequence: Synthetic oligonucleotide
aaccatgcgtgcatagcct

SEQ ID NO: 4895 - DNA, 19 bp, Artificial Sequence
  Description of Artificial Sequence: Synthetic oligonucleotide
accatgcgtgcatagcctg

SEQ ID NO: 4896 - DNA, 19 bp, Artificial Sequence
  Description of Artificial Sequence: Synthetic oligonucleotide
ccatgcgtgcatagcctgc

SEQ ID NO: 4897 - DNA, 19 bp, Artificial Sequence
  Description of Artificial Sequence: Synthetic oligonucleotide
catgcgtgcatagcctgcc

SEQ ID NO: 4898 - DNA, 19 bp, Artificial Sequence
  Description of Artificial Sequence: Synthetic oligonucleotide
atgcgtgcatagcctgccg

SEQ ID NO: 4899 - DNA, 19 bp, Artificial Sequence
  Description of Artificial Sequence: Synthetic oligonucleotide
tgcgtgcatagcctgccgc

SEQ ID NO: 4900 - DNA, 19 bp, Artificial Sequence
  Description of Artificial Sequence: Synthetic oligonucleotide
gcgtgcatagcctgccgca

SEQ ID NO: 4901 - DNA, 19 bp, Artificial Sequence
  Description of Artificial Sequence: Synthetic oligonucleotide
cgtgcatagcctgccgcat

SEQ ID NO: 4902 - DNA, 19 bp, Artificial Sequence
  Description of Artificial Sequence: Synthetic oligonucleotide
gtgcatagcctgccgcatc

SEQ ID NO: 4903 - DNA, 19 bp, Artificial Sequence
  Description of Artificial Sequence: Synthetic oligonucleotide
tgcatagcctgccgcatca

SEQ ID NO: 4904 - DNA, 19 bp, Artificial Sequence
  Description of Artificial Sequence: Synthetic oligonucleotide
gcatagcctgccgcatcat

SEQ ID NO: 4905 - DNA, 19 bp, Artificial Sequence
  Description of Artificial Sequence: Synthetic oligonucleotide
catagcctgccgcatcatt

SEQ ID NO: 4906 - DNA, 19 bp, Artificial Sequence
  Description of Artificial Sequence: Synthetic oligonucleotide
atagcctgccgcatcattt

SEQ ID NO: 4907 - DNA, 19 bp, Artificial Sequence
  Description of Artificial Sequence: Synthetic oligonucleotide
tagcctgccgcatcatttt

SEQ ID NO: 4908 - DNA, 19 bp, Artificial Sequence
  Description of Artificial Sequence: Synthetic oligonucleotide
agcctgccgcatcattttc

SEQ ID NO: 4909 - DNA, 19 bp, Artificial Sequence
  Description of Artificial Sequence: Synthetic oligonucleotide
gcctgccgcatcattttcc

SEQ ID NO: 4910 - DNA, 19 bp, Artificial Sequence
  Description of Artificial Sequence: Synthetic oligonucleotide
cctgccgcatcattttccg

SEQ ID NO: 4911 - DNA, 19 bp, Artificial Sequence
  Description of Artificial Sequence: Synthetic oligonucleotide
ctgccgcatcattttccgg

SEQ ID NO: 4912 - DNA, 19 bp, Artificial Sequence
  Description of Artificial Sequence: Synthetic oligonucleotide
tgccgcatcattttccggt

SEQ ID NO: 4913 - DNA, 19 bp, Artificial Sequence
  Description of Artificial Sequence: Synthetic oligonucleotide
gccgcatcattttccggtc

SEQ ID NO: 4914 - DNA, 19 bp, Artificial Sequence
  Description of Artificial Sequence: Synthetic oligonucleotide
ccgcatcattttccggtca

SEQ ID NO: 4915 - DNA, 19 bp, Artificial Sequence
  Description of Artificial Sequence: Synthetic oligonucleotide
cgcatcattttccggtcag

SEQ ID NO: 4916 - DNA, 19 bp, Artificial Sequence
  Description of Artificial Sequence: Synthetic oligonucleotide
gcatcattttccggtcaga

SEQ ID NO: 4917 - DNA, 19 bp, Artificial Sequence
  Description of Artificial Sequence: Synthetic oligonucleotide
catcattttccggtcagat

SEQ ID NO: 4918 - DNA, 19 bp, Artificial Sequence
  Description of Artificial Sequence: Synthetic oligonucleotide
atcattttccggtcagatg

SEQ ID NO: 4919 - DNA, 19 bp, Artificial Sequence
  Description of Artificial Sequence: Synthetic oligonucleotide
tcattttccggtcagatga

SEQ ID NO: 4920 - DNA, 19 bp, Artificial Sequence
  Description of Artificial Sequence: Synthetic oligonucleotide
cattttccggtcagatgaa

SEQ ID NO: 4921 - DNA, 19 bp, Artificial Sequence
  Description of Artificial Sequence: Synthetic oligonucleotide
attttccggtcagatgaac

SEQ ID NO: 4922 - DNA, 19 bp, Artificial Sequence
  Description of Artificial Sequence: Synthetic oligonucleotide
ttttccggtcagatgaaca

SEQ ID NO: 4923 - DNA, 19 bp, Artificial Sequence
  Description of Artificial Sequence: Synthetic oligonucleotide
tttccggtcagatgaacac

SEQ ID NO: 4924 - DNA, 19 bp, Artificial Sequence
  Description of Artificial Sequence: Synthetic oligonucleotide
ttccggtcagatgaacacc

SEQ ID NO: 4925 - DNA, 19 bp, Artificial Sequence
  Description of Artificial Sequence: Synthetic oligonucleotide
tccggtcagatgaacacca

SEQ ID NO: 4926 - DNA, 19 bp, Artificial Sequence
  Description of Artificial Sequence: Synthetic oligonucleotide
ccggtcagatgaacaccac

SEQ ID NO: 4927 - DNA, 19 bp, Artificial Sequence
  Description of Artificial Sequence: Synthetic oligonucleotide
cggtcagatgaacaccacc

SEQ ID NO: 4928 - DNA, 19 bp, Artificial Sequence
  Description of Artificial Sequence: Synthetic oligonucleotide
ggtcagatgaacaccaccc

SEQ ID NO: 4929 - DNA, 19 bp, Artificial Sequence
  Description of Artificial Sequence: Synthetic oligonucleotide
gtcagatgaacaccaccct

SEQ ID NO: 4930 - DNA, 19 bp, Artificial Sequence
  Description of Artificial Sequence: Synthetic oligonucleotide
tcagatgaacaccaccctc

SEQ ID NO: 4931 - DNA, 19 bp, Artificial Sequence
  Description of Artificial Sequence: Synthetic oligonucleotide
cagatgaacaccaccctcc

SEQ ID NO: 4932 - DNA, 19 bp, Artificial Sequence
  Description of Artificial Sequence: Synthetic oligonucleotide
agatgaacaccaccctccc

SEQ ID NO: 4933 - DNA, 19 bp, Artificial Sequence
  Description of Artificial Sequence: Synthetic oligonucleotide
gatgaacaccaccctccca

SEQ ID NO: 4934 - DNA, 19 bp, Artificial Sequence
  Description of Artificial Sequence: Synthetic oligonucleotide
atgaacaccaccctcccat

SEQ ID NO: 4935 - DNA, 19 bp, Artificial Sequence
  Description of Artificial Sequence: Synthetic oligonucleotide
tgaacaccaccctcccata

SEQ ID NO: 4936 - DNA, 19 bp, Artificial Sequence
  Description of Artificial Sequence: Synthetic oligonucleotide
gaacaccaccctcccatac

SEQ ID NO: 4937 - DNA, 19 bp, Artificial Sequence
  Description of Artificial Sequence: Synthetic oligonucleotide
aacaccaccctcccatact

SEQ ID NO: 4938 - DNA, 19 bp, Artificial Sequence
  Description of Artificial Sequence: Synthetic oligonucleotide
acaccaccctcccatactg

SEQ ID NO: 4939 - DNA, 19 bp, Artificial Sequence
  Description of Artificial Sequence: Synthetic oligonucleotide
caccaccctcccatactgc

SEQ ID NO: 4940 - DNA, 19 bp, Artificial Sequence
  Description of Artificial Sequence: Synthetic oligonucleotide
accaccctcccatactgcc

SEQ ID NO: 4941 - DNA, 19 bp, Artificial Sequence
  Description of Artificial Sequence: Synthetic oligonucleotide
ccaccctcccatactgccc

SEQ ID NO: 4942 - DNA, 19 bp, Artificial Sequence
  Description of Artificial Sequence: Synthetic oligonucleotide
caccctcccatactgcccc

SEQ ID NO: 4943 - DNA, 19 bp, Artificial Sequence
  Description of Artificial Sequence: Synthetic oligonucleotide
accctcccatactgccccc

SEQ ID NO: 4944 - DNA, 19 bp, Artificial Sequence
  Description of Artificial Sequence: Synthetic oligonucleotide
ccctcccatactgcccccc

SEQ ID NO: 4945 - DNA, 19 bp, Artificial Sequence
  Description of Artificial Sequence: Synthetic oligonucleotide
cctcccatactgcccccca

SEQ ID NO: 4946 - DNA, 19 bp, Artificial Sequence
  Description of Artificial Sequence: Synthetic oligonucleotide
ctcccatactgccccccaa

SEQ ID NO: 4947 - DNA, 19 bp, Artificial Sequence
  Description of Artificial Sequence: Synthetic oligonucleotide
tcccatactgccccccaag

SEQ ID NO: 4948 - DNA, 19 bp, Artificial Sequence
  Description of Artificial Sequence: Synthetic oligonucleotide
cccatactgccccccaagg

SEQ ID NO: 4949 - DNA, 19 bp, Artificial Sequence
  Description of Artificial Sequence: Synthetic oligonucleotide
ccatactgccccccaaggc

SEQ ID NO: 4950 - DNA, 19 bp, Artificial Sequence
  Description of Artificial Sequence: Synthetic oligonucleotide
catactgccccccaaggct

SEQ ID NO: 4951 - DNA, 19 bp, Artificial Sequence
  Description of Artificial Sequence: Synthetic oligonucleotide
atactgccccccaaggctg

SEQ ID NO: 4952 - DNA, 19 bp, Artificial Sequence
  Description of Artificial Sequence: Synthetic oligonucleotide
tactgccccccaaggctga

SEQ ID NO: 4953 - DNA, 19 bp, Artificial Sequence
  Description of Artificial Sequence: Synthetic oligonucleotide
actgccccccaaggctgac

SEQ ID NO: 4954 - DNA, 19 bp, Artificial Sequence
  Description of Artificial Sequence: Synthetic oligonucleotide
ctgccccccaaggctgacc

SEQ ID NO: 4955 - DNA, 19 bp, Artificial Sequence
  Description of Artificial Sequence: Synthetic oligonucleotide
tgccccccaaggctgacct

SEQ ID NO: 4956 - DNA, 19 bp, Artificial Sequence
  Description of Artificial Sequence: Synthetic oligonucleotide
gccccccaaggctgacctg

SEQ ID NO: 4957 - DNA, 19 bp, Artificial Sequence
  Description of Artificial Sequence: Synthetic oligonucleotide
ccccccaaggctgacctga

SEQ ID NO: 4958 - DNA, 19 bp, Artificial Sequence
  Description of Artificial Sequence: Synthetic oligonucleotide
cccccaaggctgacctgac

SEQ ID NO: 4959 - DNA, 19 bp, Artificial Sequence
  Description of Artificial Sequence: Synthetic oligonucleotide
ccccaaggctgacctgacc

SEQ ID NO: 4960 - DNA, 19 bp, Artificial Sequence
  Description of Artificial Sequence: Synthetic oligonucleotide
cccaaggctgacctgacca

SEQ ID NO: 4961 - DNA, 19 bp, Artificial Sequence
  Description of Artificial Sequence: Synthetic oligonucleotide
ccaaggctgacctgaccat

SEQ ID NO: 4962 - DNA, 19 bp, Artificial Sequence
  Description of Artificial Sequence: Synthetic oligonucleotide
caaggctgacctgaccatt

SEQ ID NO: 4963 - DNA, 19 bp, Artificial Sequence
  Description of Artificial Sequence: Synthetic oligonucleotide
aaggctgacctgaccattg

SEQ ID NO: 4964 - DNA, 19 bp, Artificial Sequence
  Description of Artificial Sequence: Synthetic oligonucleotide
aggctgacctgaccattgg

SEQ ID NO: 4965 - DNA, 19 bp, Artificial Sequence
  Description of Artificial Sequence: Synthetic oligonucleotide
ggctgacctgaccattggc

SEQ ID NO: 4966 - DNA, 19 bp, Artificial Sequence
  Description of Artificial Sequence: Synthetic oligonucleotide
gctgacctgaccattggcc

SEQ ID NO: 4967 - DNA, 19 bp, Artificial Sequence
  Description of Artificial Sequence: Synthetic oligonucleotide
ctgacctgaccattggcct

SEQ ID NO: 4968 - DNA, 19 bp, Artificial Sequence
  Description of Artificial Sequence: Synthetic oligonucleotide
tgacctgaccattggcctc

SEQ ID NO: 4969 - DNA, 19 bp, Artificial Sequence
  Description of Artificial Sequence: Synthetic oligonucleotide
gacctgaccattggcctcc

SEQ ID NO: 4970 - DNA, 19 bp, Artificial Sequence
  Description of Artificial Sequence: Synthetic oligonucleotide
acctgaccattggcctcca

SEQ ID NO: 4971 - DNA, 19 bp, Artificial Sequence
  Description of Artificial Sequence: Synthetic oligonucleotide
cctgaccattggcctccac

SEQ ID NO: 4972 - DNA, 19 bp, Artificial Sequence
  Description of Artificial Sequence: Synthetic oligonucleotide
ctgaccattggcctccacg

SEQ ID NO: 4973 - DNA, 19 bp, Artificial Sequence
  Description of Artificial Sequence: Synthetic oligonucleotide
tgaccattggcctccacgg

SEQ ID NO: 4974 - DNA, 19 bp, Artificial Sequence
  Description of Artificial Sequence: Synthetic oligonucleotide
gaccattggcctccacggg

SEQ ID NO: 4975 - DNA, 19 bp, Artificial Sequence
  Description of Artificial Sequence: Synthetic oligonucleotide
accattggcctccacgggg

SEQ ID NO: 4976 - DNA, 19 bp, Artificial Sequence
  Description of Artificial Sequence: Synthetic oligonucleotide
ccattggcctccacgggga

SEQ ID NO: 4977 - DNA, 19 bp, Artificial Sequence
  Description of Artificial Sequence: Synthetic oligonucleotide
cattggcctccacggggaa

SEQ ID NO: 4978 - DNA, 19 bp, Artificial Sequence
  Description of Artificial Sequence: Synthetic oligonucleotide
attggcctccacggggaat

SEQ ID NO: 4979 - DNA, 19 bp, Artificial Sequence
  Description of Artificial Sequence: Synthetic oligonucleotide
ttggcctccacggggaatg

SEQ ID NO: 4980 - DNA, 19 bp, Artificial Sequence
  Description of Artificial Sequence: Synthetic oligonucleotide
tggcctccacggggaatgg

SEQ ID NO: 4981 - DNA, 19 bp, Artificial Sequence
  Description of Artificial Sequence: Synthetic oligonucleotide
ggcctccacggggaatggg

SEQ ID NO: 4982 - DNA, 19 bp, Artificial Sequence
  Description of Artificial Sequence: Synthetic oligonucleotide
gcctccacggggaatgggt

SEQ ID NO: 4983 - DNA, 19 bp, Artificial Sequence
  Description of Artificial Sequence: Synthetic oligonucleotide
cctccacggggaatgggtg

SEQ ID NO: 4984 - DNA, 19 bp, Artificial Sequence
  Description of Artificial Sequence: Synthetic oligonucleotide
ctccacggggaatgggtga

SEQ ID NO: 4985 - DNA, 19 bp, Artificial Sequence
  Description of Artificial Sequence: Synthetic oligonucleotide
tccacggggaatgggtgag

SEQ ID NO: 4986 - DNA, 19 bp, Artificial Sequence
  Description of Artificial Sequence: Synthetic oligonucleotide
ccacggggaatgggtgagc

SEQ ID NO: 4987 - DNA, 19 bp, Artificial Sequence
  Description of Artificial Sequence: Synthetic oligonucleotide
cacggggaatgggtgagcc

SEQ ID NO: 4988 - DNA, 19 bp, Artificial Sequence
  Description of Artificial Sequence: Synthetic oligonucleotide
acggggaatgggtgagcca

SEQ ID NO: 4989 - DNA, 19 bp, Artificial Sequence
  Description of Artificial Sequence: Synthetic oligonucleotide
cggggaatgggtgagccag

SEQ ID NO: 4990 - DNA, 19 bp, Artificial Sequence
  Description of Artificial Sequence: Synthetic oligonucleotide
ggggaatgggtgagccagc

SEQ ID NO: 4991 - DNA, 19 bp, Artificial Sequence
  Description of Artificial Sequence: Synthetic oligonucleotide
gggaatgggtgagccagcg

SEQ ID NO: 4992 - DNA, 19 bp, Artificial Sequence
  Description of Artificial Sequence: Synthetic oligonucleotide
ggaatgggtgagccagcgc

SEQ ID NO: 4993 - DNA, 19 bp, Artificial Sequence
  Description of Artificial Sequence: Synthetic oligonucleotide
gaatgggtgagccagcgct

SEQ ID NO: 4994 - DNA, 19 bp, Artificial Sequence
  Description of Artificial Sequence: Synthetic oligonucleotide
aatgggtgagccagcgctg

SEQ ID NO: 4995 - DNA, 19 bp, Artificial Sequence
  Description of Artificial Sequence: Synthetic oligonucleotide
atgggtgagccagcgctgc

SEQ ID NO: 4996 - DNA, 19 bp, Artificial Sequence
  Description of Artificial Sequence: Synthetic oligonucleotide
tgggtgagccagcgctgcg

SEQ ID NO: 4997 - DNA, 19 bp, Artificial Sequence
  Description of Artificial Sequence: Synthetic oligonucleotide
gggtgagccagcgctgcga

SEQ ID NO: 4998 - DNA, 19 bp, Artificial Sequence
  Description of Artificial Sequence: Synthetic oligonucleotide
ggtgagccagcgctgcgag

SEQ ID NO: 4999 - DNA, 19 bp, Artificial Sequence
  Description of Artificial Sequence: Synthetic oligonucleotide
gtgagccagcgctgcgagg

SEQ ID NO: 5000 - DNA, 19 bp, Artificial Sequence
  Description of Artificial Sequence: Synthetic oligonucleotide
tgagccagcgctgcgaggt

SEQ ID NO: 5001 - DNA, 19 bp, Artificial Sequence
  Description of Artificial Sequence: Synthetic oligonucleotide
gagccagcgctgcgaggta

SEQ ID NO: 5002 - DNA, 19 bp, Artificial Sequence
  Description of Artificial Sequence: Synthetic oligonucleotide
agccagcgctgcgaggtac

SEQ ID NO: 5003 - DNA, 19 bp, Artificial Sequence
  Description of Artificial Sequence: Synthetic oligonucleotide
gccagcgctgcgaggtacg

SEQ ID NO: 5004 - DNA, 19 bp, Artificial Sequence
  Description of Artificial Sequence: Synthetic oligonucleotide
ccagcgctgcgaggtacgc

SEQ ID NO: 5005 - DNA, 19 bp, Artificial Sequence
  Description of Artificial Sequence: Synthetic oligonucleotide
cagcgctgcgaggtacgcc

SEQ ID NO: 5006 - DNA, 19 bp, Artificial Sequence
  Description of Artificial Sequence: Synthetic oligonucleotide
agcgctgcgaggtacgccc

SEQ ID NO: 5007 - DNA, 19 bp, Artificial Sequence
  Description of Artificial Sequence: Synthetic oligonucleotide
gcgctgcgaggtacgcccc

SEQ ID NO: 5008 - DNA, 19 bp, Artificial Sequence
  Description of Artificial Sequence: Synthetic oligonucleotide
cgctgcgaggtacgccccg

SEQ ID NO: 5009 - DNA, 19 bp, Artificial Sequence
  Description of Artificial Sequence: Synthetic oligonucleotide
gctgcgaggtacgccccga

SEQ ID NO: 5010 - DNA, 19 bp, Artificial Sequence
  Description of Artificial Sequence: Synthetic oligonucleotide
ctgcgaggtacgccccgag

SEQ ID NO: 5011 - DNA, 19 bp, Artificial Sequence
  Description of Artificial Sequence: Synthetic oligonucleotide
tgcgaggtacgccccgagg

SEQ ID NO: 5012 - DNA, 19 bp, Artificial Sequence
  Description of Artificial Sequence: Synthetic oligonucleotide
gcgaggtacgccccgaggt

SEQ ID NO: 5013 - DNA, 19 bp, Artificial Sequence
  Description of Artificial Sequence: Synthetic oligonucleotide
cgaggtacgccccgaggtc

SEQ ID NO: 5014 - DNA, 19 bp, Artificial Sequence
  Description of Artificial Sequence: Synthetic oligonucleotide
gaggtacgccccgaggtcc

SEQ ID NO: 5015 - DNA, 19 bp, Artificial Sequence
  Description of Artificial Sequence: Synthetic oligonucleotide
aggtacgccccgaggtcct

SEQ ID NO: 5016 - DNA, 19 bp, Artificial Sequence
  Description of Artificial Sequence: Synthetic oligonucleotide
ggtacgccccgaggtcctc

SEQ ID NO: 5017 - DNA, 19 bp, Artificial Sequence
  Description of Artificial Sequence: Synthetic oligonucleotide
gtacgccccgaggtcctct

SEQ ID NO: 5018 - DNA, 19 bp, Artificial Sequence
  Description of Artificial Sequence: Synthetic oligonucleotide
tacgccccgaggtcctctt

SEQ ID NO: 5019 - DNA, 19 bp, Artificial Sequence
  Description of Artificial Sequence: Synthetic oligonucleotide
acgccccgaggtcctcttc

SEQ ID NO: 5020 - DNA, 19 bp, Artificial Sequence
  Description of Artificial Sequence: Synthetic oligonucleotide
cgccccgaggtcctcttcc

SEQ ID NO: 5021 - DNA, 19 bp, Artificial Sequence
  Description of Artificial Sequence: Synthetic oligonucleotide
gccccgaggtcctcttcct

SEQ ID NO: 5022 - DNA, 19 bp, Artificial Sequence
  Description of Artificial Sequence: Synthetic oligonucleotide
ccccgaggtcctcttcctc

SEQ ID NO: 5023 - DNA, 19 bp, Artificial Sequence
  Description of Artificial Sequence: Synthetic oligonucleotide
cccgaggtcctcttcctca

SEQ ID NO: 5024 - DNA, 19 bp, Artificial Sequence
  Description of Artificial Sequence: Synthetic oligonucleotide
ccgaggtcctcttcctcac

SEQ ID NO: 5025 - DNA, 19 bp, Artificial Sequence
  Description of Artificial Sequence: Synthetic oligonucleotide
cgaggtcctcttcctcacc

SEQ ID NO: 5026 - DNA, 19 bp, Artificial Sequence
  Description of Artificial Sequence: Synthetic oligonucleotide
gaggtcctcttcctcaccc

SEQ ID NO: 5027 - DNA, 19 bp, Artificial Sequence
  Description of Artificial Sequence: Synthetic oligonucleotide
aggtcctcttcctcacccg

SEQ ID NO: 5028 - DNA, 19 bp, Artificial Sequence
  Description of Artificial Sequence: Synthetic oligonucleotide
ggtcctcttcctcacccgc

SEQ ID NO: 5029 - DNA, 19 bp, Artificial Sequence
  Description of Artificial Sequence: Synthetic oligonucleotide
gtcctcttcctcacccgcc

SEQ ID NO: 5030 - DNA, 19 bp, Artificial Sequence
  Description of Artificial Sequence: Synthetic oligonucleotide
tcctcttcctcacccgcca

SEQ ID NO: 5031 - DNA, 19 bp, Artificial Sequence
  Description of Artificial Sequence: Synthetic oligonucleotide
cctcttcctcacccgccac

SEQ ID NO: 5032 - DNA, 19 bp, Artificial Sequence
  Description of Artificial Sequence: Synthetic oligonucleotide
ctcttcctcacccgccact

SEQ ID NO: 5033 - DNA, 19 bp, Artificial Sequence
  Description of Artificial Sequence: Synthetic oligonucleotide
tcttcctcacccgccactt

SEQ ID NO: 5034 - DNA, 19 bp, Artificial Sequence
  Description of Artificial Sequence: Synthetic oligonucleotide
cttcctcacccgccacttc

SEQ ID NO: 5035 - DNA, 19 bp, Artificial Sequence
  Description of Artificial Sequence: Synthetic oligonucleotide
ttcctcacccgccacttca

SEQ ID NO: 5036 - DNA, 19 bp, Artificial Sequence
  Description of Artificial Sequence: Synthetic oligonucleotide
tcctcacccgccacttcat

SEQ ID NO: 5037 - DNA, 19 bp, Artificial Sequence
  Description of Artificial Sequence: Synthetic oligonucleotide
cctcacccgccacttcatc

SEQ ID NO: 5038 - DNA, 19 bp, Artificial Sequence
  Description of Artificial Sequence: Synthetic oligonucleotide
ctcacccgccacttcatct

SEQ ID NO: 5039 - DNA, 19 bp, Artificial Sequence
  Description of Artificial Sequence: Synthetic oligonucleotide
tcacccgccacttcatctt

SEQ ID NO: 5040 - DNA, 19 bp, Artificial Sequence
  Description of Artificial Sequence: Synthetic oligonucleotide
cacccgccacttcatcttc

SEQ ID NO: 5041 - DNA, 19 bp, Artificial Sequence
  Description of Artificial Sequence: Synthetic oligonucleotide
acccgccacttcatcttcc

SEQ ID NO: 5042 - DNA, 19 bp, Artificial Sequence
  Description of Artificial Sequence: Synthetic oligonucleotide
cccgccacttcatcttcca

SEQ ID NO: 5043 - DNA, 19 bp, Artificial Sequence
  Description of Artificial Sequence: Synthetic oligonucleotide
ccgccacttcatcttccac

SEQ ID NO: 5044 - DNA, 19 bp, Artificial Sequence
  Description of Artificial Sequence: Synthetic oligonucleotide
cgccacttcatcttccacg

SEQ ID NO: 5045 - DNA, 19 bp, Artificial Sequence
  Description of Artificial Sequence: Synthetic oligonucleotide
gccacttcatcttccacga

SEQ ID NO: 5046 - DNA, 19 bp, Artificial Sequence
  Description of Artificial Sequence: Synthetic oligonucleotide
ccacttcatcttccacgac

SEQ ID NO: 5047 - DNA, 19 bp, Artificial Sequence
  Description of Artificial Sequence: Synthetic oligonucleotide
cacttcatcttccacgaca

SEQ ID NO: 5048 - DNA, 19 bp, Artificial Sequence
  Description of Artificial Sequence: Synthetic oligonucleotide
acttcatcttccacgacaa

SEQ ID NO: 5049 - DNA, 19 bp, Artificial Sequence
  Description of Artificial Sequence: Synthetic oligonucleotide
cttcatcttccacgacaac

SEQ ID NO: 5050 - DNA, 19 bp, Artificial Sequence
  Description of Artificial Sequence: Synthetic oligonucleotide
ttcatcttccacgacaaca

SEQ ID NO: 5051 - DNA, 19 bp, Artificial Sequence
  Description of Artificial Sequence: Synthetic oligonucleotide
tcatcttccacgacaacaa

SEQ ID NO: 5052 - DNA, 19 bp, Artificial Sequence
  Description of Artificial Sequence: Synthetic oligonucleotide
catcttccacgacaacaac

SEQ ID NO: 5053 - DNA, 19 bp, Artificial Sequence
  Description of Artificial Sequence: Synthetic oligonucleotide
atcttccacgacaacaaca

SEQ ID NO: 5054 - DNA, 19 bp, Artificial Sequence
  Description of Artificial Sequence: Synthetic oligonucleotide
tcttccacgacaacaacaa

SEQ ID NO: 5055 - DNA, 19 bp, Artificial Sequence
  Description of Artificial Sequence: Synthetic oligonucleotide
cttccacgacaacaacaac

SEQ ID NO: 5056 - DNA, 19 bp, Artificial Sequence
  Description of Artificial Sequence: Synthetic oligonucleotide
ttccacgacaacaacaaca

SEQ ID NO: 5057 - DNA, 19 bp, Artificial Sequence
  Description of Artificial Sequence: Synthetic oligonucleotide
tccacgacaacaacaacac

SEQ ID NO: 5058 - DNA, 19 bp, Artificial Sequence
  Description of Artificial Sequence: Synthetic oligonucleotide
ccacgacaacaacaacacc

SEQ ID NO: 5059 - DNA, 19 bp, Artificial Sequence
  Description of Artificial Sequence: Synthetic oligonucleotide
cacgacaacaacaacacct

SEQ ID NO: 5060 - DNA, 19 bp, Artificial Sequence
  Description of Artificial Sequence: Synthetic oligonucleotide
acgacaacaacaacacctg

SEQ ID NO: 5061 - DNA, 19 bp, Artificial Sequence
  Description of Artificial Sequence: Synthetic oligonucleotide
cgacaacaacaacacctgg

SEQ ID NO: 5062 - DNA, 19 bp, Artificial Sequence
  Description of Artificial Sequence: Synthetic oligonucleotide
gacaacaacaacacctggg

SEQ ID NO: 5063 - DNA, 19 bp, Artificial Sequence
  Description of Artificial Sequence: Synthetic oligonucleotide
acaacaacaacacctggga

SEQ ID NO: 5064 - DNA, 19 bp, Artificial Sequence
  Description of Artificial Sequence: Synthetic oligonucleotide
caacaacaacacctgggaa

SEQ ID NO: 5065 - DNA, 19 bp, Artificial Sequence
  Description of Artificial Sequence: Synthetic oligonucleotide
aacaacaacacctgggaag

SEQ ID NO: 5066 - DNA, 19 bp, Artificial Sequence
  Description of Artificial Sequence: Synthetic oligonucleotide
acaacaacacctgggaagg

SEQ ID NO: 5067 - DNA, 19 bp, Artificial Sequence
  Description of Artificial Sequence: Synthetic oligonucleotide
caacaacacctgggaaggg

SEQ ID NO: 5068 - DNA, 19 bp, Artificial Sequence
  Description of Artificial Sequence: Synthetic oligonucleotide
aacaacacctgggaagggc

SEQ ID NO: 5069 - DNA, 19 bp, Artificial Sequence
  Description of Artificial Sequence: Synthetic oligonucleotide
acaacacctgggaagggca

SEQ ID NO: 5070 - DNA, 19 bp, Artificial Sequence
  Description of Artificial Sequence: Synthetic oligonucleotide
caacacctgggaagggcat

SEQ ID NO: 5071 - DNA, 19 bp, Artificial Sequence
  Description of Artificial Sequence: Synthetic oligonucleotide
aacacctgggaagggcatt

SEQ ID NO: 5072 - DNA, 19 bp, Artificial Sequence
  Description of Artificial Sequence: Synthetic oligonucleotide
acacctgggaagggcatta

SEQ ID NO: 5073 - DNA, 19 bp, Artificial Sequence
  Description of Artificial Sequence: Synthetic oligonucleotide
cacctgggaagggcattac

SEQ ID NO: 5074 - DNA, 19 bp, Artificial Sequence
  Description of Artificial Sequence: Synthetic oligonucleotide
acctgggaagggcattact

SEQ ID NO: 5075 - DNA, 19 bp, Artificial Sequence
  Description of Artificial Sequence: Synthetic oligonucleotide
cctgggaagggcattacta

SEQ ID NO: 5076 - DNA, 19 bp, Artificial Sequence
  Description of Artificial Sequence: Synthetic oligonucleotide
ctgggaagggcattactac

SEQ ID NO: 5077 - DNA, 19 bp, Artificial Sequence
  Description of Artificial Sequence: Synthetic oligonucleotide
tgggaagggcattactacc

SEQ ID NO: 5078 - DNA, 19 bp, Artificial Sequence
  Description of Artificial Sequence: Synthetic oligonucleotide
gggaagggcattactacca

SEQ ID NO: 5079 - DNA, 19 bp, Artificial Sequence
  Description of Artificial Sequence: Synthetic oligonucleotide
ggaagggcattactaccac

SEQ ID NO: 5080 - DNA, 19 bp, Artificial Sequence
  Description of Artificial Sequence: Synthetic oligonucleotide
gaagggcattactaccact

SEQ ID NO: 5081 - DNA, 19 bp, Artificial Sequence
  Description of Artificial Sequence: Synthetic oligonucleotide
aagggcattactaccacta

SEQ ID NO: 5082 - DNA, 19 bp, Artificial Sequence
  Description of Artificial Sequence: Synthetic oligonucleotide
agggcattactaccactac

SEQ ID NO: 5083 - DNA, 19 bp, Artificial Sequence
  Description of Artificial Sequence: Synthetic oligonucleotide
gggcattactaccactact

SEQ ID NO: 5084 - DNA, 19 bp, Artificial Sequence
  Description of Artificial Sequence: Synthetic oligonucleotide
ggcattactaccactactc

SEQ ID NO: 5085 - DNA, 19 bp, Artificial Sequence
  Description of Artificial Sequence: Synthetic oligonucleotide
gcattactaccactactca

SEQ ID NO: 5086 - DNA, 19 bp, Artificial Sequence
  Description of Artificial Sequence: Synthetic oligonucleotide
cattactaccactactcag

SEQ ID NO: 5087 - DNA, 19 bp, Artificial Sequence
  Description of Artificial Sequence: Synthetic oligonucleotide
attactaccactactcaga

SEQ ID NO: 5088 - DNA, 19 bp, Artificial Sequence
  Description of Artificial Sequence: Synthetic oligonucleotide
ttactaccactactcagac

SEQ ID NO: 5089 - DNA, 19 bp, Artificial Sequence
  Description of Artificial Sequence: Synthetic oligonucleotide
tactaccactactcagacc

SEQ ID NO: 5090 - DNA, 19 bp, Artificial Sequence
  Description of Artificial Sequence: Synthetic oligonucleotide
actaccactactcagaccc

SEQ ID NO: 5091 - DNA, 19 bp, Artificial Sequence
  Description of Artificial Sequence: Synthetic oligonucleotide
ctaccactactcagaccct

SEQ ID NO: 5092 - DNA, 19 bp, Artificial Sequence
  Description of Artificial Sequence: Synthetic oligonucleotide
taccactactcagaccctg

SEQ ID NO: 5093 - DNA, 19 bp, Artificial Sequence
  Description of Artificial Sequence: Synthetic oligonucleotide
accactactcagaccctgt

SEQ ID NO: 5094 - DNA, 19 bp, Artificial Sequence
  Description of Artificial Sequence: Synthetic oligonucleotide
ccactactcagaccctgtc

SEQ ID NO: 5095 - DNA, 19 bp, Artificial Sequence
  Description of Artificial Sequence: Synthetic oligonucleotide
cactactcagaccctgtct

SEQ ID NO: 5096 - DNA, 19 bp, Artificial Sequence
  Description of Artificial Sequence: Synthetic oligonucleotide
actactcagaccctgtctg

SEQ ID NO: 5097 - DNA, 19 bp, Artificial Sequence
  Description of Artificial Sequence: Synthetic oligonucleotide
ctactcagaccctgtctgc

SEQ ID NO: 5098 - DNA, 19 bp, Artificial Sequence
  Description of Artificial Sequence: Synthetic oligonucleotide
tactcagaccctgtctgca

SEQ ID NO: 5099 - DNA, 19 bp, Artificial Sequence
  Description of Artificial Sequence: Synthetic oligonucleotide
actcagaccctgtctgcaa

SEQ ID NO: 5100 - DNA, 19 bp, Artificial Sequence
  Description of Artificial Sequence: Synthetic oligonucleotide
ctcagaccctgtctgcaag

SEQ ID NO: 5101 - DNA, 19 bp, Artificial Sequence
  Description of Artificial Sequence: Synthetic oligonucleotide
tcagaccctgtctgcaagc

SEQ ID NO: 5102 - DNA, 19 bp, Artificial Sequence
  Description of Artificial Sequence: Synthetic oligonucleotide
cagaccctgtctgcaagca

SEQ ID NO: 5103 - DNA, 19 bp, Artificial Sequence
  Description of Artificial Sequence: Synthetic oligonucleotide
agaccctgtctgcaagcac

SEQ ID NO: 5104 - DNA, 19 bp, Artificial Sequence
  Description of Artificial Sequence: Synthetic oligonucleotide
gaccctgtctgcaagcacc

SEQ ID NO: 5105 - DNA, 19 bp, Artificial Sequence
  Description of Artificial Sequence: Synthetic oligonucleotide
accctgtctgcaagcaccc

SEQ ID NO: 5106 - DNA, 19 bp, Artificial Sequence
  Description of Artificial Sequence: Synthetic oligonucleotide
ccctgtctgcaagcacccc

SEQ ID NO: 5107 - DNA, 19 bp, Artificial Sequence
  Description of Artificial Sequence: Synthetic oligonucleotide
cctgtctgcaagcacccca

SEQ ID NO: 5108 - DNA, 19 bp, Artificial Sequence
  Description of Artificial Sequence: Synthetic oligonucleotide
ctgtctgcaagcaccccac

SEQ ID NO: 5109 - DNA, 19 bp, Artificial Sequence
  Description of Artificial Sequence: Synthetic oligonucleotide
tgtctgcaagcaccccaca

SEQ ID NO: 5110 - DNA, 19 bp, Artificial Sequence
  Description of Artificial Sequence: Synthetic oligonucleotide
gtctgcaagcaccccacat

SEQ ID NO: 5111 - DNA, 19 bp, Artificial Sequence
  Description of Artificial Sequence: Synthetic oligonucleotide
tctgcaagcaccccacatt

SEQ ID NO: 5112 - DNA, 19 bp, Artificial Sequence
  Description of Artificial Sequence: Synthetic oligonucleotide
ctgcaagcaccccacattc

SEQ ID NO: 5113 - DNA, 19 bp, Artificial Sequence
  Description of Artificial Sequence: Synthetic oligonucleotide
tgcaagcaccccacattca

SEQ ID NO: 5114 - DNA, 19 bp, Artificial Sequence
  Description of Artificial Sequence: Synthetic oligonucleotide
gcaagcaccccacattcac

SEQ ID NO: 5115 - DNA, 19 bp, Artificial Sequence
  Description of Artificial Sequence: Synthetic oligonucleotide
caagcaccccacattcacc

SEQ ID NO: 5116 - DNA, 19 bp, Artificial Sequence
  Description of Artificial Sequence: Synthetic oligonucleotide
aagcaccccacattcacca

SEQ ID NO: 5117 - DNA, 19 bp, Artificial Sequence
  Description of Artificial Sequence: Synthetic oligonucleotide
agcaccccacattcaccat

SEQ ID NO: 5118 - DNA, 19 bp, Artificial Sequence
  Description of Artificial Sequence: Synthetic oligonucleotide
gcaccccacattcaccatc

SEQ ID NO: 5119 - DNA, 19 bp, Artificial Sequence
  Description of Artificial Sequence: Synthetic oligonucleotide
caccccacattcaccatct

SEQ ID NO: 5120 - DNA, 19 bp, Artificial Sequence
  Description of Artificial Sequence: Synthetic oligonucleotide
accccacattcaccatcta

SEQ ID NO: 5121 - DNA, 19 bp, Artificial Sequence
  Description of Artificial Sequence: Synthetic oligonucleotide
ccccacattcaccatctac

SEQ ID NO: 5122 - DNA, 19 bp, Artificial Sequence
  Description of Artificial Sequence: Synthetic oligonucleotide
cccacattcaccatctacg

SEQ ID NO: 5123 - DNA, 19 bp, Artificial Sequence
  Description of Artificial Sequence: Synthetic oligonucleotide
ccacattcaccatctacgc

SEQ ID NO: 5124 - DNA, 19 bp, Artificial Sequence
  Description of Artificial Sequence: Synthetic oligonucleotide
cacattcaccatctacgct

SEQ ID NO: 5125 - DNA, 19 bp, Artificial Sequence
  Description of Artificial Sequence: Synthetic oligonucleotide
acattcaccatctacgctc

SEQ ID NO: 5126 - DNA, 19 bp, Artificial Sequence
  Description of Artificial Sequence: Synthetic oligonucleotide
cattcaccatctacgctcg

SEQ ID NO: 5127 - DNA, 19 bp, Artificial Sequence
  Description of Artificial Sequence: Synthetic oligonucleotide
attcaccatctacgctcga

SEQ ID NO: 5128 - DNA, 19 bp, Artificial Sequence
  Description of Artificial Sequence: Synthetic oligonucleotide
ttcaccatctacgctcgag

SEQ ID NO: 5129 - DNA, 19 bp, Artificial Sequence
  Description of Artificial Sequence: Synthetic oligonucleotide
tcaccatctacgctcgagg

SEQ ID NO: 5130 - DNA, 19 bp, Artificial Sequence
  Description of Artificial Sequence: Synthetic oligonucleotide
caccatctacgctcgaggc

SEQ ID NO: 5131 - DNA, 19 bp, Artificial Sequence
  Description of Artificial Sequence: Synthetic oligonucleotide
accatctacgctcgaggcc

SEQ ID NO: 5132 - DNA, 19 bp, Artificial Sequence
  Description of Artificial Sequence: Synthetic oligonucleotide
ccatctacgctcgaggccg

SEQ ID NO: 5133 - DNA, 19 bp, Artificial Sequence
  Description of Artificial Sequence: Synthetic oligonucleotide
catctacgctcgaggccgc

SEQ ID NO: 5134 - DNA, 19 bp, Artificial Sequence
  Description of Artificial Sequence: Synthetic oligonucleotide
atctacgctcgaggccgct

SEQ ID NO: 5135 - DNA, 19 bp, Artificial Sequence
  Description of Artificial Sequence: Synthetic oligonucleotide
tctacgctcgaggccgcta

SEQ ID NO: 5136 - DNA, 19 bp, Artificial Sequence
  Description of Artificial Sequence: Synthetic oligonucleotide
ctacgctcgaggccgctac

SEQ ID NO: 5137 - DNA, 19 bp, Artificial Sequence
  Description of Artificial Sequence: Synthetic oligonucleotide
tacgctcgaggccgctaca

SEQ ID NO: 5138 - DNA, 19 bp, Artificial Sequence
  Description of Artificial Sequence: Synthetic oligonucleotide
acgctcgaggccgctacag

SEQ ID NO: 5139 - DNA, 19 bp, Artificial Sequence
  Description of Artificial Sequence: Synthetic oligonucleotide
cgctcgaggccgctacagc

SEQ ID NO: 5140 - DNA, 19 bp, Artificial Sequence
  Description of Artificial Sequence: Synthetic oligonucleotide
gctcgaggccgctacagcc

SEQ ID NO: 5141 - DNA, 19 bp, Artificial Sequence
  Description of Artificial Sequence: Synthetic oligonucleotide
ctcgaggccgctacagccg

SEQ ID NO: 5142 - DNA, 19 bp, Artificial Sequence
  Description of Artificial Sequence: Synthetic oligonucleotide
tcgaggccgctacagccgc

SEQ ID NO: 5143 - DNA, 19 bp, Artificial Sequence
  Description of Artificial Sequence: Synthetic oligonucleotide
cgaggccgctacagccgcg

SEQ ID NO: 5144 - DNA, 19 bp, Artificial Sequence
  Description of Artificial Sequence: Synthetic oligonucleotide
gaggccgctacagccgcgg

SEQ ID NO: 5145 - DNA, 19 bp, Artificial Sequence
  Description of Artificial Sequence: Synthetic oligonucleotide
aggccgctacagccgcggt

SEQ ID NO: 5146 - DNA, 19 bp, Artificial Sequence
  Description of Artificial Sequence: Synthetic oligonucleotide
ggccgctacagccgcggtg

SEQ ID NO: 5147 - DNA, 19 bp, Artificial Sequence
  Description of Artificial Sequence: Synthetic oligonucleotide
gccgctacagccgcggtgt

SEQ ID NO: 5148 - DNA, 19 bp, Artificial Sequence
  Description of Artificial Sequence: Synthetic oligonucleotide
ccgctacagccgcggtgtg

SEQ ID NO: 5149 - DNA, 19 bp, Artificial Sequence
  Description of Artificial Sequence: Synthetic oligonucleotide
cgctacagccgcggtgtgc

SEQ ID NO: 5150 - DNA, 19 bp, Artificial Sequence
  Description of Artificial Sequence: Synthetic oligonucleotide
gctacagccgcggtgtgct

SEQ ID NO: 5151 - DNA, 19 bp, Artificial Sequence
  Description of Artificial Sequence: Synthetic oligonucleotide
ctacagccgcggtgtgctc

SEQ ID NO: 5152 - DNA, 19 bp, Artificial Sequence
  Description of Artificial Sequence: Synthetic oligonucleotide
tacagccgcggtgtgctct

SEQ ID NO: 5153 - DNA, 19 bp, Artificial Sequence
  Description of Artificial Sequence: Synthetic oligonucleotide
acagccgcggtgtgctctc

SEQ ID NO: 5154 - DNA, 19 bp, Artificial Sequence
  Description of Artificial Sequence: Synthetic oligonucleotide
cagccgcggtgtgctctca

SEQ ID NO: 5155 - DNA, 19 bp, Artificial Sequence
  Description of Artificial Sequence: Synthetic oligonucleotide
agccgcggtgtgctctcat

SEQ ID NO: 5156 - DNA, 19 bp, Artificial Sequence
  Description of Artificial Sequence: Synthetic oligonucleotide
gccgcggtgtgctctcatc

SEQ ID NO: 5157 - DNA, 19 bp, Artificial Sequence
  Description of Artificial Sequence: Synthetic oligonucleotide
ccgcggtgtgctctcatct

SEQ ID NO: 5158 - DNA, 19 bp, Artificial Sequence
  Description of Artificial Sequence: Synthetic oligonucleotide
cgcggtgtgctctcatcta

SEQ ID NO: 5159 - DNA, 19 bp, Artificial Sequence
  Description of Artificial Sequence: Synthetic oligonucleotide
gcggtgtgctctcatctaa

SEQ ID NO: 5160 - DNA, 19 bp, Artificial Sequence
  Description of Artificial Sequence: Synthetic oligonucleotide
cggtgtgctctcatctaag

SEQ ID NO: 5161 - DNA, 19 bp, Artificial Sequence
  Description of Artificial Sequence: Synthetic oligonucleotide
ggtgtgctctcatctaagg

SEQ ID NO: 5162 - DNA, 19 bp, Artificial Sequence
  Description of Artificial Sequence: Synthetic oligonucleotide
gtgtgctctcatctaaggt

SEQ ID NO: 5163 - DNA, 19 bp, Artificial Sequence
  Description of Artificial Sequence: Synthetic oligonucleotide
tgtgctctcatctaaggtc

SEQ ID NO: 5164 - DNA, 19 bp, Artificial Sequence
  Description of Artificial Sequence: Synthetic oligonucleotide
gtgctctcatctaaggtca

SEQ ID NO: 5165 - DNA, 19 bp, Artificial Sequence
  Description of Artificial Sequence: Synthetic oligonucleotide
tgctctcatctaaggtcat

SEQ ID NO: 5166 - DNA, 19 bp, Artificial Sequence
  Description of Artificial Sequence: Synthetic oligonucleotide
gctctcatctaaggtcatg

SEQ ID NO: 5167 - DNA, 19 bp, Artificial Sequence
  Description of Artificial Sequence: Synthetic oligonucleotide
ctctcatctaaggtcatgg

SEQ ID NO: 5168 - DNA, 19 bp, Artificial Sequence
  Description of Artificial Sequence: Synthetic oligonucleotide
cagaggtacagtggccgct

SEQ ID NO: 5169 - DNA, 19 bp, Artificial Sequence
  Description of Artificial Sequence: Synthetic oligonucleotide
tcagaggtacagtggccgc

SEQ ID NO: 5170 - DNA, 19 bp, Artificial Sequence
  Description of Artificial Sequence: Synthetic oligonucleotide
ctcagaggtacagtggccg

SEQ ID NO: 5171 - DNA, 19 bp, Artificial Sequence
  Description of Artificial Sequence: Synthetic oligonucleotide
gctcagaggtacagtggcc

SEQ ID NO: 5172 - DNA, 19 bp, Artificial Sequence
  Description of Artificial Sequence: Synthetic oligonucleotide
agctcagaggtacagtggc

SEQ ID NO: 5173 - DNA, 19 bp, Artificial Sequence
  Description of Artificial Sequence: Synthetic oligonucleotide
cagctcagaggtacagtgg

SEQ ID NO: 5174 - DNA, 19 bp, Artificial Sequence
  Description of Artificial Sequence: Synthetic oligonucleotide
acagctcagaggtacagtg

SEQ ID NO: 5175 - DNA, 19 bp, Artificial Sequence
  Description of Artificial Sequence: Synthetic oligonucleotide
cacagctcagaggtacagt

SEQ ID NO: 5176 - DNA, 19 bp, Artificial Sequence
  Description of Artificial Sequence: Synthetic oligonucleotide
gcacagctcagaggtacag

SEQ ID NO: 5177 - DNA, 19 bp, Artificial Sequence
  Description of Artificial Sequence: Synthetic oligonucleotide
tgcacagctcagaggtaca

SEQ ID NO: 5178 - DNA, 19 bp, Artificial Sequence
  Description of Artificial Sequence: Synthetic oligonucleotide
gtgcacagctcagaggtac

SEQ ID NO: 5179 - DNA, 19 bp, Artificial Sequence
  Description of Artificial Sequence: Synthetic oligonucleotide
cgtgcacagctcagaggta

SEQ ID NO: 5180 - DNA, 19 bp, Artificial Sequence
  Description of Artificial Sequence: Synthetic oligonucleotide
gcgtgcacagctcagaggt

SEQ ID NO: 5181 - DNA, 19 bp, Artificial Sequence
  Description of Artificial Sequence: Synthetic oligonucleotide
ggcgtgcacagctcagagg

SEQ ID NO: 5182 - DNA, 19 bp, Artificial Sequence
  Description of Artificial Sequence: Synthetic oligonucleotide
cggcgtgcacagctcagag

SEQ ID NO: 5183 - DNA, 19 bp, Artificial Sequence
  Description of Artificial Sequence: Synthetic oligonucleotide
gcggcgtgcacagctcaga

SEQ ID NO: 5184 - DNA, 19 bp, Artificial Sequence
  Description of Artificial Sequence: Synthetic oligonucleotide
cgcggcgtgcacagctcag

SEQ ID NO: 5185 - DNA, 19 bp, Artificial Sequence
  Description of Artificial Sequence: Synthetic oligonucleotide
ccgcggcgtgcacagctca

SEQ ID NO: 5186 - DNA, 19 bp, Artificial Sequence
  Description of Artificial Sequence: Synthetic oligonucleotide
gccgcggcgtgcacagctc

SEQ ID NO: 5187 - DNA, 19 bp, Artificial Sequence
  Description of Artificial Sequence: Synthetic oligonucleotide
ggccgcggcgtgcacagct

SEQ ID NO: 5188 - DNA, 19 bp, Artificial Sequence
  Description of Artificial Sequence: Synthetic oligonucleotide
cggccgcggcgtgcacagc

SEQ ID NO: 5189 - DNA, 19 bp, Artificial Sequence
  Description of Artificial Sequence: Synthetic oligonucleotide
ccggccgcggcgtgcacag

SEQ ID NO: 5190 - DNA, 19 bp, Artificial Sequence
  Description of Artificial Sequence: Synthetic oligonucleotide
cccggccgcggcgtgcaca

SEQ ID NO: 5191 - DNA, 19 bp, Artificial Sequence
  Description of Artificial Sequence: Synthetic oligonucleotide
ccccggccgcggcgtgcac

SEQ ID NO: 5192 - DNA, 19 bp, Artificial Sequence
  Description of Artificial Sequence: Synthetic oligonucleotide
gccccggccgcggcgtgca

SEQ ID NO: 5193 - DNA, 19 bp, Artificial Sequence
  Description of Artificial Sequence: Synthetic oligonucleotide
cgccccggccgcggcgtgc

SEQ ID NO: 5194 - DNA, 19 bp, Artificial Sequence
  Description of Artificial Sequence: Synthetic oligonucleotide
ccgccccggccgcggcgtg

SEQ ID NO: 5195 - DNA, 19 bp, Artificial Sequence
  Description of Artificial Sequence: Synthetic oligonucleotide
cccgccccggccgcggcgt

SEQ ID NO: 5196 - DNA, 19 bp, Artificial Sequence
  Description of Artificial Sequence: Synthetic oligonucleotide
gcccgccccggccgcggcg

SEQ ID NO: 5197 - DNA, 19 bp, Artificial Sequence
  Description of Artificial Sequence: Synthetic oligonucleotide
ggcccgccccggccgcggc

SEQ ID NO: 5198 - DNA, 19 bp, Artificial Sequence
  Description of Artificial Sequence: Synthetic oligonucleotide
aggcccgccccggccgcgg

SEQ ID NO: 5199 - DNA, 19 bp, Artificial Sequence
  Description of Artificial Sequence: Synthetic oligonucleotide
gaggcccgccccggccgcg

SEQ ID NO: 5200 - DNA, 19 bp, Artificial Sequence
  Description of Artificial Sequence: Synthetic oligonucleotide
cgaggcccgccccggccgc

SEQ ID NO: 5201 - DNA, 19 bp, Artificial Sequence
  Description of Artificial Sequence: Synthetic oligonucleotide
ccgaggcccgccccggccg

SEQ ID NO: 5202 - DNA, 19 bp, Artificial Sequence
  Description of Artificial Sequence: Synthetic oligonucleotide
cccgaggcccgccccggcc

SEQ ID NO: 5203 - DNA, 19 bp, Artificial Sequence
  Description of Artificial Sequence: Synthetic oligonucleotide
tcccgaggcccgccccggc

SEQ ID NO: 5204 - DNA, 19 bp, Artificial Sequence
  Description of Artificial Sequence: Synthetic oligonucleotide
gtcccgaggcccgccccgg

SEQ ID NO: 5205 - DNA, 19 bp, Artificial Sequence
  Description of Artificial Sequence: Synthetic oligonucleotide
agtcccgaggcccgccccg

SEQ ID NO: 5206 - DNA, 19 bp, Artificial Sequence
  Description of Artificial Sequence: Synthetic oligonucleotide
cagtcccgaggcccgcccc

SEQ ID NO: 5207 - DNA, 19 bp, Artificial Sequence
  Description of Artificial Sequence: Synthetic oligonucleotide
ccagtcccgaggcccgccc

SEQ ID NO: 5208 - DNA, 19 bp, Artificial Sequence
  Description of Artificial Sequence: Synthetic oligonucleotide
cccagtcccgaggcccgcc

SEQ ID NO: 5209 - DNA, 19 bp, Artificial Sequence
  Description of Artificial Sequence: Synthetic oligonucleotide
ccccagtcccgaggcccgc

SEQ ID NO: 5210 - DNA, 19 bp, Artificial Sequence
  Description of Artificial Sequence: Synthetic oligonucleotide
gccccagtcccgaggcccg

SEQ ID NO: 5211 - DNA, 19 bp, Artificial Sequence
  Description of Artificial Sequence: Synthetic oligonucleotide
agccccagtcccgaggccc

SEQ ID NO: 5212 - DNA, 19 bp, Artificial Sequence
  Description of Artificial Sequence: Synthetic oligonucleotide
cagccccagtcccgaggcc

SEQ ID NO: 5213 - DNA, 19 bp, Artificial Sequence
  Description of Artificial Sequence: Synthetic oligonucleotide
ccagccccagtcccgaggc

SEQ ID NO: 5214 - DNA, 19 bp, Artificial Sequence
  Description of Artificial Sequence: Synthetic oligonucleotide
cccagccccagtcccgagg

SEQ ID NO: 5215 - DNA, 19 bp, Artificial Sequence
  Description of Artificial Sequence: Synthetic oligonucleotide
tcccagccccagtcccgag

SEQ ID NO: 5216 - DNA, 19 bp, Artificial Sequence
  Description of Artificial Sequence: Synthetic oligonucleotide
ctcccagccccagtcccga

SEQ ID NO: 5217 - DNA, 19 bp, Artificial Sequence
  Description of Artificial Sequence: Synthetic oligonucleotide
gctcccagccccagtcccg

SEQ ID NO: 5218 - DNA, 19 bp, Artificial Sequence
  Description of Artificial Sequence: Synthetic oligonucleotide
ggctcccagccccagtccc

SEQ ID NO: 5219 - DNA, 19 bp, Artificial Sequence
  Description of Artificial Sequence: Synthetic oligonucleotide
tggctcccagccccagtcc

SEQ ID NO: 5220 - DNA, 19 bp, Artificial Sequence
  Description of Artificial Sequence: Synthetic oligonucleotide
ttggctcccagccccagtc

SEQ ID NO: 5221 - DNA, 19 bp, Artificial Sequence
  Description of Artificial Sequence: Synthetic oligonucleotide
cttggctcccagccccagt

SEQ ID NO: 5222 - DNA, 19 bp, Artificial Sequence
  Description of Artificial Sequence: Synthetic oligonucleotide
ccttggctcccagccccag

SEQ ID NO: 5223 - DNA, 19 bp, Artificial Sequence
  Description of Artificial Sequence: Synthetic oligonucleotide
cccttggctcccagcccca

SEQ ID NO: 5224 - DNA, 19 bp, Artificial Sequence
  Description of Artificial Sequence: Synthetic oligonucleotide
ccccttggctcccagcccc

SEQ ID NO: 5225 - DNA, 19 bp, Artificial Sequence
  Description of Artificial Sequence: Synthetic oligonucleotide
gccccttggctcccagccc

SEQ ID NO: 5226 - DNA, 19 bp, Artificial Sequence
  Description of Artificial Sequence: Synthetic oligonucleotide
ggccccttggctcccagcc

SEQ ID NO: 5227 - DNA, 19 bp, Artificial Sequence
  Description of Artificial Sequence: Synthetic oligonucleotide
cggccccttggctcccagc

SEQ ID NO: 5228 - DNA, 19 bp, Artificial Sequence
  Description of Artificial Sequence: Synthetic oligonucleotide
ccggccccttggctcccag

SEQ ID NO: 5229 - DNA, 19 bp, Artificial Sequence
  Description of Artificial Sequence: Synthetic oligonucleotide
cccggccccttggctccca

SEQ ID NO: 5230 - DNA, 19 bp, Artificial Sequence
  Description of Artificial Sequence: Synthetic oligonucleotide
ccccggccccttggctccc

SEQ ID NO: 5231 - DNA, 19 bp, Artificial Sequence
  Description of Artificial Sequence: Synthetic oligonucleotide
gccccggccccttggctcc

SEQ ID NO: 5232 - DNA, 19 bp, Artificial Sequence
  Description of Artificial Sequence: Synthetic oligonucleotide
cgccccggccccttggctc

SEQ ID NO: 5233 - DNA, 19 bp, Artificial Sequence
  Description of Artificial Sequence: Synthetic oligonucleotide
ccgccccggccccttggct

SEQ ID NO: 5234 - DNA, 19 bp, Artificial Sequence
  Description of Artificial Sequence: Synthetic oligonucleotide
cccgccccggccccttggc

SEQ ID NO: 5235 - DNA, 19 bp, Artificial Sequence
  Description of Artificial Sequence: Synthetic oligonucleotide
tcccgccccggccccttgg

SEQ ID NO: 5236 - DNA, 19 bp, Artificial Sequence
  Description of Artificial Sequence: Synthetic oligonucleotide
gtcccgccccggccccttg

SEQ ID NO: 5237 - DNA, 19 bp, Artificial Sequence
  Description of Artificial Sequence: Synthetic oligonucleotide
cgtcccgccccggcccctt

SEQ ID NO: 5238 - DNA, 19 bp, Artificial Sequence
  Description of Artificial Sequence: Synthetic oligonucleotide
gcgtcccgccccggcccct

SEQ ID NO: 5239 - DNA, 19 bp, Artificial Sequence
  Description of Artificial Sequence: Synthetic oligonucleotide
cgcgtcccgccccggcccc

SEQ ID NO: 5240 - DNA, 19 bp, Artificial Sequence
  Description of Artificial Sequence: Synthetic oligonucleotide
ccgcgtcccgccccggccc

SEQ ID NO: 5241 - DNA, 19 bp, Artificial Sequence
  Description of Artificial Sequence: Synthetic oligonucleotide
tccgcgtcccgccccggcc

SEQ ID NO: 5242 - DNA, 19 bp, Artificial Sequence
  Description of Artificial Sequence: Synthetic oligonucleotide
ctccgcgtcccgccccggc

SEQ ID NO: 5243 - DNA, 19 bp, Artificial Sequence
  Description of Artificial Sequence: Synthetic oligonucleotide
tctccgcgtcccgccccgg

SEQ ID NO: 5244 - DNA, 19 bp, Artificial Sequence
  Description of Artificial Sequence: Synthetic oligonucleotide
ctctccgcgtcccgccccg

SEQ ID NO: 5245 - DNA, 19 bp, Artificial Sequence
  Description of Artificial Sequence: Synthetic oligonucleotide
cctctccgcgtcccgcccc

SEQ ID NO: 5246 - DNA, 19 bp, Artificial Sequence
  Description of Artificial Sequence: Synthetic oligonucleotide
gcctctccgcgtcccgccc

SEQ ID NO: 5247 - DNA, 19 bp, Artificial Sequence
  Description of Artificial Sequence: Synthetic oligonucleotide
agcctctccgcgtcccgcc

SEQ ID NO: 5248 - DNA, 19 bp, Artificial Sequence
  Description of Artificial Sequence: Synthetic oligonucleotide
cagcctctccgcgtcccgc

SEQ ID NO: 5249 - DNA, 19 bp, Artificial Sequence
  Description of Artificial Sequence: Synthetic oligonucleotide
ccagcctctccgcgtcccg

SEQ ID NO: 5250 - DNA, 19 bp, Artificial Sequence
  Description of Artificial Sequence: Synthetic oligonucleotide
cccagcctctccgcgtccc

SEQ ID NO: 5251 - DNA, 19 bp, Artificial Sequence
  Description of Artificial Sequence: Synthetic oligonucleotide
gcccagcctctccgcgtcc

SEQ ID NO: 5252 - DNA, 19 bp, Artificial Sequence
  Description of Artificial Sequence: Synthetic oligonucleotide
agcccagcctctccgcgtc

SEQ ID NO: 5253 - DNA, 19 bp, Artificial Sequence
  Description of Artificial Sequence: Synthetic oligonucleotide
cagcccagcctctccgcgt

SEQ ID NO: 5254 - DNA, 19 bp, Artificial Sequence
  Description of Artificial Sequence: Synthetic oligonucleotide
gcagcccagcctctccgcg

SEQ ID NO: 5255 - DNA, 19 bp, Artificial Sequence
  Description of Artificial Sequence: Synthetic oligonucleotide
cgcagcccagcctctccgc

SEQ ID NO: 5256 - DNA, 19 bp, Artificial Sequence
  Description of Artificial Sequence: Synthetic oligonucleotide
ccgcagcccagcctctccg

SEQ ID NO: 5257 - DNA, 19 bp, Artificial Sequence
  Description of Artificial Sequence: Synthetic oligonucleotide
accgcagcccagcctctcc

SEQ ID NO: 5258 - DNA, 19 bp, Artificial Sequence
  Description of Artificial Sequence: Synthetic oligonucleotide
aaccgcagcccagcctctc

SEQ ID NO: 5259 - DNA, 19 bp, Artificial Sequence
  Description of Artificial Sequence: Synthetic oligonucleotide
gaaccgcagcccagcctct

SEQ ID NO: 5260 - DNA, 19 bp, Artificial Sequence
  Description of Artificial Sequence: Synthetic oligonucleotide
cgaaccgcagcccagcctc

SEQ ID NO: 5261 - DNA, 19 bp, Artificial Sequence
  Description of Artificial Sequence: Synthetic oligonucleotide
ccgaaccgcagcccagcct

SEQ ID NO: 5262 - DNA, 19 bp, Artificial Sequence
  Description of Artificial Sequence: Synthetic oligonucleotide
tccgaaccgcagcccagcc

SEQ ID NO: 5263 - DNA, 19 bp, Artificial Sequence
  Description of Artificial Sequence: Synthetic oligonucleotide
ctccgaaccgcagcccagc

SEQ ID NO: 5264 - DNA, 19 bp, Artificial Sequence
  Description of Artificial Sequence: Synthetic oligonucleotide
actccgaaccgcagcccag

SEQ ID NO: 5265 - DNA, 19 bp, Artificial Sequence
  Description of Artificial Sequence: Synthetic oligonucleotide
gactccgaaccgcagccca

SEQ ID NO: 5266 - DNA, 19 bp, Artificial Sequence
  Description of Artificial Sequence: Synthetic oligonucleotide
ggactccgaaccgcagccc

SEQ ID NO: 5267 - DNA, 19 bp, Artificial Sequence
  Description of Artificial Sequence: Synthetic oligonucleotide
gggactccgaaccgcagcc

SEQ ID NO: 5268 - DNA, 19 bp, Artificial Sequence
  Description of Artificial Sequence: Synthetic oligonucleotide
cgggactccgaaccgcagc

SEQ ID NO: 5269 - DNA, 19 bp, Artificial Sequence
  Description of Artificial Sequence: Synthetic oligonucleotide
gcgggactccgaaccgcag

SEQ ID NO: 5270 - DNA, 19 bp, Artificial Sequence
  Description of Artificial Sequence: Synthetic oligonucleotide
cgcgggactccgaaccgca

SEQ ID NO: 5271 - DNA, 19 bp, Artificial Sequence
  Description of Artificial Sequence: Synthetic oligonucleotide
gcgcgggactccgaaccgc

SEQ ID NO: 5272 - DNA, 19 bp, Artificial Sequence
  Description of Artificial Sequence: Synthetic oligonucleotide
cgcgcgggactccgaaccg

SEQ ID NO: 5273 - DNA, 19 bp, Artificial Sequence
  Description of Artificial Sequence: Synthetic oligonucleotide
ccgcgcgggactccgaacc

SEQ ID NO: 5274 - DNA, 19 bp, Artificial Sequence
  Description of Artificial Sequence: Synthetic oligonucleotide
tccgcgcgggactccgaac

SEQ ID NO: 5275 - DNA, 19 bp, Artificial Sequence
  Description of Artificial Sequence: Synthetic oligonucleotide
gtccgcgcgggactccgaa

SEQ ID NO: 5276 - DNA, 19 bp, Artificial Sequence
  Description of Artificial Sequence: Synthetic oligonucleotide
tgtccgcgcgggactccga

SEQ ID NO: 5277 - DNA, 19 bp, Artificial Sequence
  Description of Artificial Sequence: Synthetic oligonucleotide
ctgtccgcgcgggactccg

SEQ ID NO: 5278 - DNA, 19 bp, Artificial Sequence
  Description of Artificial Sequence: Synthetic oligonucleotide
cctgtccgcgcgggactcc

SEQ ID NO: 5279 - DNA, 19 bp, Artificial Sequence
  Description of Artificial Sequence: Synthetic oligonucleotide
ccctgtccgcgcgggactc

SEQ ID NO: 5280 - DNA, 19 bp, Artificial Sequence
  Description of Artificial Sequence: Synthetic oligonucleotide
cccctgtccgcgcgggact

SEQ ID NO: 5281 - DNA, 19 bp, Artificial Sequence
  Description of Artificial Sequence: Synthetic oligonucleotide
gcccctgtccgcgcgggac

SEQ ID NO: 5282 - DNA, 19 bp, Artificial Sequence
  Description of Artificial Sequence: Synthetic oligonucleotide
ggcccctgtccgcgcggga

SEQ ID NO: 5283 - DNA, 19 bp, Artificial Sequence
  Description of Artificial Sequence: Synthetic oligonucleotide
cggcccctgtccgcgcggg

SEQ ID NO: 5284 - DNA, 19 bp, Artificial Sequence
  Description of Artificial Sequence: Synthetic oligonucleotide
ccggcccctgtccgcgcgg

SEQ ID NO: 5285 - DNA, 19 bp, Artificial Sequence
  Description of Artificial Sequence: Synthetic oligonucleotide
tccggcccctgtccgcgcg

SEQ ID NO: 5286 - DNA, 19 bp, Artificial Sequence
  Description of Artificial Sequence: Synthetic oligonucleotide
gtccggcccctgtccgcgc

SEQ ID NO: 5287 - DNA, 19 bp, Artificial Sequence
  Description of Artificial Sequence: Synthetic oligonucleotide
cgtccggcccctgtccgcg

SEQ ID NO: 5288 - DNA, 19 bp, Artificial Sequence
  Description of Artificial Sequence: Synthetic oligonucleotide
ccgtccggcccctgtccgc

SEQ ID NO: 5289 - DNA, 19 bp, Artificial Sequence
  Description of Artificial Sequence: Synthetic oligonucleotide
gccgtccggcccctgtccg

SEQ ID NO: 5290 - DNA, 19 bp, Artificial Sequence
  Description of Artificial Sequence: Synthetic oligonucleotide
cgccgtccggcccctgtcc

SEQ ID NO: 5291 - DNA, 19 bp, Artificial Sequence
  Description of Artificial Sequence: Synthetic oligonucleotide
ccgccgtccggcccctgtc

SEQ ID NO: 5292 - DNA, 19 bp, Artificial Sequence
  Description of Artificial Sequence: Synthetic oligonucleotide
gccgccgtccggcccctgt

SEQ ID NO: 5293 - DNA, 19 bp, Artificial Sequence
  Description of Artificial Sequence: Synthetic oligonucleotide
cgccgccgtccggcccctg

SEQ ID NO: 5294 - DNA, 19 bp, Artificial Sequence
  Description of Artificial Sequence: Synthetic oligonucleotide
tcgccgccgtccggcccct

SEQ ID NO: 5295 - DNA, 19 bp, Artificial Sequence
  Description of Artificial Sequence: Synthetic oligonucleotide
ctcgccgccgtccggcccc

SEQ ID NO: 5296 - DNA, 19 bp, Artificial Sequence
  Description of Artificial Sequence: Synthetic oligonucleotide
cctcgccgccgtccggccc

SEQ ID NO: 5297 - DNA, 19 bp, Artificial Sequence
  Description of Artificial Sequence: Synthetic oligonucleotide
ccctcgccgccgtccggcc

SEQ ID NO: 5298 - DNA, 19 bp, Artificial Sequence
  Description of Artificial Sequence: Synthetic oligonucleotide
tccctcgccgccgtccggc

SEQ ID NO: 5299 - DNA, 19 bp, Artificial Sequence
  Description of Artificial Sequence: Synthetic oligonucleotide
ctccctcgccgccgtccgg

SEQ ID NO: 5300 - DNA, 19 bp, Artificial Sequence
  Description of Artificial Sequence: Synthetic oligonucleotide
gctccctcgccgccgtccg

SEQ ID NO: 5301 - DNA, 19 bp, Artificial Sequence
  Description of Artificial Sequence: Synthetic oligonucleotide
cgctccctcgccgccgtcc

SEQ ID NO: 5302 - DNA, 19 bp, Artificial Sequence
  Description of Artificial Sequence: Synthetic oligonucleotide
gcgctccctcgccgccgtc

SEQ ID NO: 5303 - DNA, 19 bp, Artificial Sequence
  Description of Artificial Sequence: Synthetic oligonucleotide
cgcgctccctcgccgccgt

SEQ ID NO: 5304 - DNA, 19 bp, Artificial Sequence
  Description of Artificial Sequence: Synthetic oligonucleotide
gcgcgctccctcgccgccg

SEQ ID NO: 5305 - DNA, 19 bp, Artificial Sequence
  Description of Artificial Sequence: Synthetic oligonucleotide
cgcgcgctccctcgccgcc

SEQ ID NO: 5306 - DNA, 19 bp, Artificial Sequence
  Description of Artificial Sequence: Synthetic oligonucleotide
gcgcgcgctccctcgccgc

SEQ ID NO: 5307 - DNA, 19 bp, Artificial Sequence
  Description of Artificial Sequence: Synthetic oligonucleotide
ggcgcgcgctccctcgccg

SEQ ID NO: 5308 - DNA, 19 bp, Artificial Sequence
  Description of Artificial Sequence: Synthetic oligonucleotide
gggcgcgcgctccctcgcc

SEQ ID NO: 5309 - DNA, 19 bp, Artificial Sequence
  Description of Artificial Sequence: Synthetic oligonucleotide
ggggcgcgcgctccctcgc

SEQ ID NO: 5310 - DNA, 19 bp, Artificial Sequence
  Description of Artificial Sequence: Synthetic oligonucleotide
cggggcgcgcgctccctcg

SEQ ID NO: 5311 - DNA, 19 bp, Artificial Sequence
  Description of Artificial Sequence: Synthetic oligonucleotide
gcggggcgcgcgctccctc

SEQ ID NO: 5312 - DNA, 19 bp, Artificial Sequence
  Description of Artificial Sequence: Synthetic oligonucleotide
tgcggggcgcgcgctccct

SEQ ID NO: 5313 - DNA, 19 bp, Artificial Sequence
  Description of Artificial Sequence: Synthetic oligonucleotide
ctgcggggcgcgcgctccc

SEQ ID NO: 5314 - DNA, 19 bp, Artificial Sequence
  Description of Artificial Sequence: Synthetic oligonucleotide
actgcggggcgcgcgctcc

SEQ ID NO: 5315 - DNA, 19 bp, Artificial Sequence
  Description of Artificial Sequence: Synthetic oligonucleotide
gactgcggggcgcgcgctc

SEQ ID NO: 5316 - DNA, 19 bp, Artificial Sequence
  Description of Artificial Sequence: Synthetic oligonucleotide
ggactgcggggcgcgcgct

SEQ ID NO: 5317 - DNA, 19 bp, Artificial Sequence
  Description of Artificial Sequence: Synthetic oligonucleotide
gggactgcggggcgcgcgc

SEQ ID NO: 5318 - DNA, 19 bp, Artificial Sequence
  Description of Artificial Sequence: Synthetic oligonucleotide
cgggactgcggggcgcgcg

SEQ ID NO: 5319 - DNA, 19 bp, Artificial Sequence
  Description of Artificial Sequence: Synthetic oligonucleotide
gcgggactgcggggcgcgc

SEQ ID NO: 5320 - DNA, 19 bp, Artificial Sequence
  Description of Artificial Sequence: Synthetic oligonucleotide
cgcgggactgcggggcgcg

SEQ ID NO: 5321 - DNA, 19 bp, Artificial Sequence
  Description of Artificial Sequence: Synthetic oligonucleotide
gcgcgggactgcggggcgc

SEQ ID NO: 5322 - DNA, 19 bp, Artificial Sequence
  Description of Artificial Sequence: Synthetic oligonucleotide
agcgcgggactgcggggcg

SEQ ID NO: 5323 - DNA, 19 bp, Artificial Sequence
  Description of Artificial Sequence: Synthetic oligonucleotide
cagcgcgggactgcggggc

SEQ ID NO: 5324 - DNA, 19 bp, Artificial Sequence
  Description of Artificial Sequence: Synthetic oligonucleotide
gcagcgcgggactgcgggg

SEQ ID NO: 5325 - DNA, 19 bp, Artificial Sequence
  Description of Artificial Sequence: Synthetic oligonucleotide
cgcagcgcgggactgcggg

SEQ ID NO: 5326 - DNA, 19 bp, Artificial Sequence
  Description of Artificial Sequence: Synthetic oligonucleotide
gcgcagcgcgggactgcgg

SEQ ID NO: 5327 - DNA, 19 bp, Artificial Sequence
  Description of Artificial Sequence: Synthetic oligonucleotide
ggcgcagcgcgggactgcg

SEQ ID NO: 5328 - DNA, 19 bp, Artificial Sequence
  Description of Artificial Sequence: Synthetic oligonucleotide
cggcgcagcgcgggactgc

SEQ ID NO: 5329 - DNA, 19 bp, Artificial Sequence
  Description of Artificial Sequence: Synthetic oligonucleotide
ccggcgcagcgcgggactg

SEQ ID NO: 5330 - DNA, 19 bp, Artificial Sequence
  Description of Artificial Sequence: Synthetic oligonucleotide
gccggcgcagcgcgggact

SEQ ID NO: 5331 - DNA, 19 bp, Artificial Sequence
  Description of Artificial Sequence: Synthetic oligonucleotide
ggccggcgcagcgcgggac

SEQ ID NO: 5332 - DNA, 19 bp, Artificial Sequence
  Description of Artificial Sequence: Synthetic oligonucleotide
cggccggcgcagcgcggga

SEQ ID NO: 5333 - DNA, 19 bp, Artificial Sequence
  Description of Artificial Sequence: Synthetic oligonucleotide
ccggccggcgcagcgcggg

SEQ ID NO: 5334 - DNA, 19 bp, Artificial Sequence
  Description of Artificial Sequence: Synthetic oligonucleotide
cccggccggcgcagcgcgg

SEQ ID NO: 5335 - DNA, 19 bp, Artificial Sequence
  Description of Artificial Sequence: Synthetic oligonucleotide
ccccggccggcgcagcgcg

SEQ ID NO: 5336 - DNA, 19 bp, Artificial Sequence
  Description of Artificial Sequence: Synthetic oligonucleotide
tccccggccggcgcagcgc

SEQ ID NO: 5337 - DNA, 19 bp, Artificial Sequence
  Description of Artificial Sequence: Synthetic oligonucleotide
atccccggccggcgcagcg

SEQ ID NO: 5338 - DNA, 19 bp, Artificial Sequence
  Description of Artificial Sequence: Synthetic oligonucleotide
catccccggccggcgcagc

SEQ ID NO: 5339 - DNA, 19 bp, Artificial Sequence
  Description of Artificial Sequence: Synthetic oligonucleotide
ccatccccggccggcgcag

SEQ ID NO: 5340 - DNA, 19 bp, Artificial Sequence
  Description of Artificial Sequence: Synthetic oligonucleotide
cccatccccggccggcgca

SEQ ID NO: 5341 - DNA, 19 bp, Artificial Sequence
  Description of Artificial Sequence: Synthetic oligonucleotide
ccccatccccggccggcgc

SEQ ID NO: 5342 - DNA, 19 bp, Artificial Sequence
  Description of Artificial Sequence: Synthetic oligonucleotide
gccccatccccggccggcg

SEQ ID NO: 5343 - DNA, 19 bp, Artificial Sequence
  Description of Artificial Sequence: Synthetic oligonucleotide
cgccccatccccggccggc

SEQ ID NO: 5344 - DNA, 19 bp, Artificial Sequence
  Description of Artificial Sequence: Synthetic oligonucleotide
gcgccccatccccggccgg

SEQ ID NO: 5345 - DNA, 19 bp, Artificial Sequence
  Description of Artificial Sequence: Synthetic oligonucleotide
cgcgccccatccccggccg

SEQ ID NO: 5346 - DNA, 19 bp, Artificial Sequence
  Description of Artificial Sequence: Synthetic oligonucleotide
gcgcgccccatccccggcc

SEQ ID NO: 5347 - DNA, 19 bp, Artificial Sequence
  Description of Artificial Sequence: Synthetic oligonucleotide
agcgcgccccatccccggc

SEQ ID NO: 5348 - DNA, 19 bp, Artificial Sequence
  Description of Artificial Sequence: Synthetic oligonucleotide
cagcgcgccccatccccgg

SEQ ID NO: 5349 - DNA, 19 bp, Artificial Sequence
  Description of Artificial Sequence: Synthetic oligonucleotide
gcagcgcgccccatccccg

SEQ ID NO: 5350 - DNA, 19 bp, Artificial Sequence
  Description of Artificial Sequence: Synthetic oligonucleotide
agcagcgcgccccatcccc

SEQ ID NO: 5351 - DNA, 19 bp, Artificial Sequence
  Description of Artificial Sequence: Synthetic oligonucleotide
cagcagcgcgccccatccc

SEQ ID NO: 5352 - DNA, 19 bp, Artificial Sequence
  Description of Artificial Sequence: Synthetic oligonucleotide
gcagcagcgcgccccatcc

SEQ ID NO: 5353 - DNA, 19 bp, Artificial Sequence
  Description of Artificial Sequence: Synthetic oligonucleotide
ggcagcagcgcgccccatc

SEQ ID NO: 5354 - DNA, 19 bp, Artificial Sequence
  Description of Artificial Sequence: Synthetic oligonucleotide
aggcagcagcgcgccccat

SEQ ID NO: 5355 - DNA, 19 bp, Artificial Sequence
  Description of Artificial Sequence: Synthetic oligonucleotide
caggcagcagcgcgcccca

SEQ ID NO: 5356 - DNA, 19 bp, Artificial Sequence
  Description of Artificial Sequence: Synthetic oligonucleotide
tcaggcagcagcgcgcccc

SEQ ID NO: 5357 - DNA, 19 bp, Artificial Sequence
  Description of Artificial Sequence: Synthetic oligonucleotide
ctcaggcagcagcgcgccc

SEQ ID NO: 5358 - DNA, 19 bp, Artificial Sequence
  Description of Artificial Sequence: Synthetic oligonucleotide
cctcaggcagcagcgcgcc

SEQ ID NO: 5359 - DNA, 19 bp, Artificial Sequence
  Description of Artificial Sequence: Synthetic oligonucleotide
gcctcaggcagcagcgcgc

SEQ ID NO: 5360 - DNA, 19 bp, Artificial Sequence
  Description of Artificial Sequence: Synthetic oligonucleotide
ggcctcaggcagcagcgcg

SEQ ID NO: 5361 - DNA, 19 bp, Artificial Sequence
  Description of Artificial Sequence: Synthetic oligonucleotide
gggcctcaggcagcagcgc

SEQ ID NO: 5362 - DNA, 19 bp, Artificial Sequence
  Description of Artificial Sequence: Synthetic oligonucleotide
cgggcctcaggcagcagcg

SEQ ID NO: 5363 - DNA, 19 bp, Artificial Sequence
  Description of Artificial Sequence: Synthetic oligonucleotide
ccgggcctcaggcagcagc

SEQ ID NO: 5364 - DNA, 19 bp, Artificial Sequence
  Description of Artificial Sequence: Synthetic oligonucleotide
gccgggcctcaggcagcag

SEQ ID NO: 5365 - DNA, 19 bp, Artificial Sequence
  Description of Artificial Sequence: Synthetic oligonucleotide
ggccgggcctcaggcagca

SEQ ID NO: 5366 - DNA, 19 bp, Artificial Sequence
  Description of Artificial Sequence: Synthetic oligonucleotide
aggccgggcctcaggcagc

SEQ ID NO: 5367 - DNA, 19 bp, Artificial Sequence
  Description of Artificial Sequence: Synthetic oligonucleotide
caggccgggcctcaggcag

SEQ ID NO: 5368 - DNA, 19 bp, Artificial Sequence
  Description of Artificial Sequence: Synthetic oligonucleotide
ccaggccgggcctcaggca

SEQ ID NO: 5369 - DNA, 19 bp, Artificial Sequence
  Description of Artificial Sequence: Synthetic oligonucleotide
gccaggccgggcctcaggc

SEQ ID NO: 5370 - DNA, 19 bp, Artificial Sequence
  Description of Artificial Sequence: Synthetic oligonucleotide
cgccaggccgggcctcagg

SEQ ID NO: 5371 - DNA, 19 bp, Artificial Sequence
  Description of Artificial Sequence: Synthetic oligonucleotide
ccgccaggccgggcctcag

SEQ ID NO: 5372 - DNA, 19 bp, Artificial Sequence
  Description of Artificial Sequence: Synthetic oligonucleotide
cccgccaggccgggcctca

SEQ ID NO: 5373 - DNA, 19 bp, Artificial Sequence
  Description of Artificial Sequence: Synthetic oligonucleotide
gcccgccaggccgggcctc

SEQ ID NO: 5374 - DNA, 19 bp, Artificial Sequence
  Description of Artificial Sequence: Synthetic oligonucleotide
cgcccgccaggccgggcct

SEQ ID NO: 5375 - DNA, 19 bp, Artificial Sequence
  Description of Artificial Sequence: Synthetic oligonucleotide
gcgcccgccaggccgggcc

SEQ ID NO: 5376 - DNA, 19 bp, Artificial Sequence
  Description of Artificial Sequence: Synthetic oligonucleotide
ggcgcccgccaggccgggc

SEQ ID NO: 5377 - DNA, 19 bp, Artificial Sequence
  Description of Artificial Sequence: Synthetic oligonucleotide
gggcgcccgccaggccggg

SEQ ID NO: 5378 - DNA, 19 bp, Artificial Sequence
  Description of Artificial Sequence: Synthetic oligonucleotide
cgggcgcccgccaggccgg

SEQ ID NO: 5379 - DNA, 19 bp, Artificial Sequence
  Description of Artificial Sequence: Synthetic oligonucleotide
gcgggcgcccgccaggccg

SEQ ID NO: 5380 - DNA, 19 bp, Artificial Sequence
  Description of Artificial Sequence: Synthetic oligonucleotide
ggcgggcgcccgccaggcc

SEQ ID NO: 5381 - DNA, 19 bp, Artificial Sequence
  Description of Artificial Sequence: Synthetic oligonucleotide
cggcgggcgcccgccaggc

SEQ ID NO: 5382 - DNA, 19 bp, Artificial Sequence
  Description of Artificial Sequence: Synthetic oligonucleotide
ccggcgggcgcccgccagg

SEQ ID NO: 5383 - DNA, 19 bp, Artificial Sequence
  Description of Artificial Sequence: Synthetic oligonucleotide
cccggcgggcgcccgccag

SEQ ID NO: 5384 - DNA, 19 bp, Artificial Sequence
  Description of Artificial Sequence: Synthetic oligonucleotide
ccccggcgggcgcccgcca

SEQ ID NO: 5385 - DNA, 19 bp, Artificial Sequence
  Description of Artificial Sequence: Synthetic oligonucleotide
cccccggcgggcgcccgcc

SEQ ID NO: 5386 - DNA, 19 bp, Artificial Sequence
  Description of Artificial Sequence: Synthetic oligonucleotide
gcccccggcgggcgcccgc

SEQ ID NO: 5387 - DNA, 19 bp, Artificial Sequence
  Description of Artificial Sequence: Synthetic oligonucleotide
agcccccggcgggcgcccg

SEQ ID NO: 5388 - DNA, 19 bp, Artificial Sequence
  Description of Artificial Sequence: Synthetic oligonucleotide
cagcccccggcgggcgccc

SEQ ID NO: 5389 - DNA, 19 bp, Artificial Sequence
  Description of Artificial Sequence: Synthetic oligonucleotide
gcagcccccggcgggcgcc

SEQ ID NO: 5390 - DNA, 19 bp, Artificial Sequence
  Description of Artificial Sequence: Synthetic oligonucleotide
cgcagcccccggcgggcgc

SEQ ID NO: 5391 - DNA, 19 bp, Artificial Sequence
  Description of Artificial Sequence: Synthetic oligonucleotide
ccgcagcccccggcgggcg

SEQ ID NO: 5392 - DNA, 19 bp, Artificial Sequence
  Description of Artificial Sequence: Synthetic oligonucleotide
gccgcagcccccggcgggc

SEQ ID NO: 5393 - DNA, 19 bp, Artificial Sequence
  Description of Artificial Sequence: Synthetic oligonucleotide
agccgcagcccccggcggg

SEQ ID NO: 5394 - DNA, 19 bp, Artificial Sequence
  Description of Artificial Sequence: Synthetic oligonucleotide
cagccgcagcccccggcgg

SEQ ID NO: 5395 - DNA, 19 bp, Artificial Sequence
  Description of Artificial Sequence: Synthetic oligonucleotide
tcagccgcagcccccggcg

SEQ ID NO: 5396 - DNA, 19 bp, Artificial Sequence
  Description of Artificial Sequence: Synthetic oligonucleotide
ctcagccgcagcccccggc

SEQ ID NO: 5397 - DNA, 19 bp, Artificial Sequence
  Description of Artificial Sequence: Synthetic oligonucleotide
cctcagccgcagcccccgg

SEQ ID NO: 5398 - DNA, 19 bp, Artificial Sequence
  Description of Artificial Sequence: Synthetic oligonucleotide
tcctcagccgcagcccccg

SEQ ID NO: 5399 - DNA, 19 bp, Artificial Sequence
  Description of Artificial Sequence: Synthetic oligonucleotide
ctcctcagccgcagccccc

SEQ ID NO: 5400 - DNA, 19 bp, Artificial Sequence
  Description of Artificial Sequence: Synthetic oligonucleotide
gctcctcagccgcagcccc

SEQ ID NO: 5401 - DNA, 19 bp, Artificial Sequence
  Description of Artificial Sequence: Synthetic oligonucleotide
ggctcctcagccgcagccc

SEQ ID NO: 5402 - DNA, 19 bp, Artificial Sequence
  Description of Artificial Sequence: Synthetic oligonucleotide
cggctcctcagccgcagcc

SEQ ID NO: 5403 - DNA, 19 bp, Artificial Sequence
  Description of Artificial Sequence: Synthetic oligonucleotide
tcggctcctcagccgcagc

SEQ ID NO: 5404 - DNA, 19 bp, Artificial Sequence
  Description of Artificial Sequence: Synthetic oligonucleotide
ctcggctcctcagccgcag

SEQ ID NO: 5405 - DNA, 19 bp, Artificial Sequence
  Description of Artificial Sequence: Synthetic oligonucleotide
cctcggctcctcagccgca

SEQ ID NO: 5406 - DNA, 19 bp, Artificial Sequence
  Description of Artificial Sequence: Synthetic oligonucleotide
ccctcggctcctcagccgc

SEQ ID NO: 5407 - DNA, 19 bp, Artificial Sequence
  Description of Artificial Sequence: Synthetic oligonucleotide
gccctcggctcctcagccg

SEQ ID NO: 5408 - DNA, 19 bp, Artificial Sequence
  Description of Artificial Sequence: Synthetic oligonucleotide
cgccctcggctcctcagcc

SEQ ID NO: 5409 - DNA, 19 bp, Artificial Sequence
  Description of Artificial Sequence: Synthetic oligonucleotide
gcgccctcggctcctcagc

SEQ ID NO: 5410 - DNA, 19 bp, Artificial Sequence
  Description of Artificial Sequence: Synthetic oligonucleotide
ggcgccctcggctcctcag

SEQ ID NO: 5411 - DNA, 19 bp, Artificial Sequence
  Description of Artificial Sequence: Synthetic oligonucleotide
gggcgccctcggctcctca

SEQ ID NO: 5412 - DNA, 19 bp, Artificial Sequence
  Description of Artificial Sequence: Synthetic oligonucleotide
agggcgccctcggctcctc

SEQ ID NO: 5413 - DNA, 19 bp, Artificial Sequence
  Description of Artificial Sequence: Synthetic oligonucleotide
cagggcgccctcggctcct

SEQ ID NO: 5414 - DNA, 19 bp, Artificial Sequence
  Description of Artificial Sequence: Synthetic oligonucleotide
acagggcgccctcggctcc

SEQ ID NO: 5415 - DNA, 19 bp, Artificial Sequence
  Description of Artificial Sequence: Synthetic oligonucleotide
tacagggcgccctcggctc

SEQ ID NO: 5416 - DNA, 19 bp, Artificial Sequence
  Description of Artificial Sequence: Synthetic oligonucleotide
gtacagggcgccctcggct

SEQ ID NO: 5417 - DNA, 19 bp, Artificial Sequence
  Description of Artificial Sequence: Synthetic oligonucleotide
ggtacagggcgccctcggc

SEQ ID NO: 5418 - DNA, 19 bp, Artificial Sequence
  Description of Artificial Sequence: Synthetic oligonucleotide
cggtacagggcgccctcgg

SEQ ID NO: 5419 - DNA, 19 bp, Artificial Sequence
  Description of Artificial Sequence: Synthetic oligonucleotide
ccggtacagggcgccctcg

SEQ ID NO: 5420 - DNA, 19 bp, Artificial Sequence
  Description of Artificial Sequence: Synthetic oligonucleotide
tccggtacagggcgccctc

SEQ ID NO: 5421 - DNA, 19 bp, Artificial Sequence
  Description of Artificial Sequence: Synthetic oligonucleotide
ctccggtacagggcgccct

SEQ ID NO: 5422 - DNA, 19 bp, Artificial Sequence
  Description of Artificial Sequence: Synthetic oligonucleotide
actccggtacagggcgccc

SEQ ID NO: 5423 - DNA, 19 bp, Artificial Sequence
  Description of Artificial Sequence: Synthetic oligonucleotide
cactccggtacagggcgcc

SEQ ID NO: 5424 - DNA, 19 bp, Artificial Sequence
  Description of Artificial Sequence: Synthetic oligonucleotide
ccactccggtacagggcgc

SEQ ID NO: 5425 - DNA, 19 bp, Artificial Sequence
  Description of Artificial Sequence: Synthetic oligonucleotide
gccactccggtacagggcg

SEQ ID NO: 5426 - DNA, 19 bp, Artificial Sequence
  Description of Artificial Sequence: Synthetic oligonucleotide
ggccactccggtacagggc

SEQ ID NO: 5427 - DNA, 19 bp, Artificial Sequence
  Description of Artificial Sequence: Synthetic oligonucleotide
gggccactccggtacaggg

SEQ ID NO: 5428 - DNA, 19 bp, Artificial Sequence
  Description of Artificial Sequence: Synthetic oligonucleotide
cgggccactccggtacagg

SEQ ID NO: 5429 - DNA, 19 bp, Artificial Sequence
  Description of Artificial Sequence: Synthetic oligonucleotide
gcgggccactccggtacag

SEQ ID NO: 5430 - DNA, 19 bp, Artificial Sequence
  Description of Artificial Sequence: Synthetic oligonucleotide
cgcgggccactccggtaca

SEQ ID NO: 5431 - DNA, 19 bp, Artificial Sequence
  Description of Artificial Sequence: Synthetic oligonucleotide
gcgcgggccactccggtac

SEQ ID NO: 5432 - DNA, 19 bp, Artificial Sequence
  Description of Artificial Sequence: Synthetic oligonucleotide
cgcgcgggccactccggta

SEQ ID NO: 5433 - DNA, 19 bp, Artificial Sequence
  Description of Artificial Sequence: Synthetic oligonucleotide
gcgcgcgggccactccggt

SEQ ID NO: 5434 - DNA, 19 bp, Artificial Sequence
  Description of Artificial Sequence: Synthetic oligonucleotide
cgcgcgcgggccactccgg

SEQ ID NO: 5435 - DNA, 19 bp, Artificial Sequence
  Description of Artificial Sequence: Synthetic oligonucleotide
gcgcgcgcgggccactccg

SEQ ID NO: 5436 - DNA, 19 bp, Artificial Sequence
  Description of Artificial Sequence: Synthetic oligonucleotide
cgcgcgcgcgggccactcc

SEQ ID NO: 5437 - DNA, 19 bp, Artificial Sequence
  Description of Artificial Sequence: Synthetic oligonucleotide
gcgcgcgcgcgggccactc

SEQ ID NO: 5438 - DNA, 19 bp, Artificial Sequence
  Description of Artificial Sequence: Synthetic oligonucleotide
agcgcgcgcgcgggccact

SEQ ID NO: 5439 - DNA, 19 bp, Artificial Sequence
  Description of Artificial Sequence: Synthetic oligonucleotide
gagcgcgcgcgcgggccac

SEQ ID NO: 5440 - DNA, 19 bp, Artificial Sequence
  Description of Artificial Sequence: Synthetic oligonucleotide
cgagcgcgcgcgcgggcca

SEQ ID NO: 5441 - DNA, 19 bp, Artificial Sequence
  Description of Artificial Sequence: Synthetic oligonucleotide
ccgagcgcgcgcgcgggcc

SEQ ID NO: 5442 - DNA, 19 bp, Artificial Sequence
  Description of Artificial Sequence: Synthetic oligonucleotide
tccgagcgcgcgcgcgggc

SEQ ID NO: 5443 - DNA, 19 bp, Artificial Sequence
  Description of Artificial Sequence: Synthetic oligonucleotide
ctccgagcgcgcgcgcggg

SEQ ID NO: 5444 - DNA, 19 bp, Artificial Sequence
  Description of Artificial Sequence: Synthetic oligonucleotide
cctccgagcgcgcgcgcgg

SEQ ID NO: 5445 - DNA, 19 bp, Artificial Sequence
  Description of Artificial Sequence: Synthetic oligonucleotide
ccctccgagcgcgcgcgcg

SEQ ID NO: 5446 - DNA, 19 bp, Artificial Sequence
  Description of Artificial Sequence: Synthetic oligonucleotide
cccctccgagcgcgcgcgc

SEQ ID NO: 5447 - DNA, 19 bp, Artificial Sequence
  Description of Artificial Sequence: Synthetic oligonucleotide
ccccctccgagcgcgcgcg

SEQ ID NO: 5448 - DNA, 19 bp, Artificial Sequence
  Description of Artificial Sequence: Synthetic oligonucleotide
tccccctccgagcgcgcgc

SEQ ID NO: 5449 - DNA, 19 bp, Artificial Sequence
  Description of Artificial Sequence: Synthetic oligonucleotide
gtccccctccgagcgcgcg

SEQ ID NO: 5450 - DNA, 19 bp, Artificial Sequence
  Description of Artificial Sequence: Synthetic oligonucleotide
tgtccccctccgagcgcgc

SEQ ID NO: 5451 - DNA, 19 bp, Artificial Sequence
  Description of Artificial Sequence: Synthetic oligonucleotide
ctgtccccctccgagcgcg

SEQ ID NO: 5452 - DNA, 19 bp, Artificial Sequence
  Description of Artificial Sequence: Synthetic oligonucleotide
tctgtccccctccgagcgc

SEQ ID NO: 5453 - DNA, 19 bp, Artificial Sequence
  Description of Artificial Sequence: Synthetic oligonucleotide
ctctgtccccctccgagcg

SEQ ID NO: 5454 - DNA, 19 bp, Artificial Sequence
  Description of Artificial Sequence: Synthetic oligonucleotide
tctctgtccccctccgagc

SEQ ID NO: 5455 - DNA, 19 bp, Artificial Sequence
  Description of Artificial Sequence: Synthetic oligonucleotide
gtctctgtccccctccgag

SEQ ID NO: 5456 - DNA, 19 bp, Artificial Sequence
  Description of Artificial Sequence: Synthetic oligonucleotide
cgtctctgtccccctccga

SEQ ID NO: 5457 - DNA, 19 bp, Artificial Sequence
  Description of Artificial Sequence: Synthetic oligonucleotide
ccgtctctgtccccctccg

SEQ ID NO: 5458 - DNA, 19 bp, Artificial Sequence
  Description of Artificial Sequence: Synthetic oligonucleotide
tccgtctctgtccccctcc

SEQ ID NO: 5459 - DNA, 19 bp, Artificial Sequence
  Description of Artificial Sequence: Synthetic oligonucleotide
gtccgtctctgtccccctc

SEQ ID NO: 5460 - DNA, 19 bp, Artificial Sequence
  Description of Artificial Sequence: Synthetic oligonucleotide
agtccgtctctgtccccct

SEQ ID NO: 5461 - DNA, 19 bp, Artificial Sequence
  Description of Artificial Sequence: Synthetic oligonucleotide
tagtccgtctctgtccccc

SEQ ID NO: 5462 - DNA, 19 bp, Artificial Sequence
  Description of Artificial Sequence: Synthetic oligonucleotide
gtagtccgtctctgtcccc

SEQ ID NO: 5463 - DNA, 19 bp, Artificial Sequence
  Description of Artificial Sequence: Synthetic oligonucleotide
tgtagtccgtctctgtccc

SEQ ID NO: 5464 - DNA, 19 bp, Artificial Sequence
  Description of Artificial Sequence: Synthetic oligonucleotide
ctgtagtccgtctctgtcc

SEQ ID NO: 5465 - DNA, 19 bp, Artificial Sequence
  Description of Artificial Sequence: Synthetic oligonucleotide
gctgtagtccgtctctgtc

SEQ ID NO: 5466 - DNA, 19 bp, Artificial Sequence
  Description of Artificial Sequence: Synthetic oligonucleotide
cgctgtagtccgtctctgt

SEQ ID NO: 5467 - DNA, 19 bp, Artificial Sequence
  Description of Artificial Sequence: Synthetic oligonucleotide
tcgctgtagtccgtctctg

SEQ ID NO: 5468 - DNA, 19 bp, Artificial Sequence
  Description of Artificial Sequence: Synthetic oligonucleotide
ctcgctgtagtccgtctct

SEQ ID NO: 5469 - DNA, 19 bp, Artificial Sequence
  Description of Artificial Sequence: Synthetic oligonucleotide
cctcgctgtagtccgtctc

SEQ ID NO: 5470 - DNA, 19 bp, Artificial Sequence
  Description of Artificial Sequence: Synthetic oligonucleotide
gcctcgctgtagtccgtct

SEQ ID NO: 5471 - DNA, 19 bp, Artificial Sequence
  Description of Artificial Sequence: Synthetic oligonucleotide
ggcctcgctgtagtccgtc

SEQ ID NO: 5472 - DNA, 19 bp, Artificial Sequence
  Description of Artificial Sequence: Synthetic oligonucleotide
gggcctcgctgtagtccgt

SEQ ID NO: 5473 - DNA, 19 bp, Artificial Sequence
  Description of Artificial Sequence: Synthetic oligonucleotide
cgggcctcgctgtagtccg

SEQ ID NO: 5474 - DNA, 19 bp, Artificial Sequence
  Description of Artificial Sequence: Synthetic oligonucleotide
ccgggcctcgctgtagtcc

SEQ ID NO: 5475 - DNA, 19 bp, Artificial Sequence
  Description of Artificial Sequence: Synthetic oligonucleotide
tccgggcctcgctgtagtc

SEQ ID NO: 5476 - DNA, 19 bp, Artificial Sequence
  Description of Artificial Sequence: Synthetic oligonucleotide
ctccgggcctcgctgtagt

SEQ ID NO: 5477 - DNA, 19 bp, Artificial Sequence
  Description of Artificial Sequence: Synthetic oligonucleotide
cctccgggcctcgctgtag

SEQ ID NO: 5478 - DNA, 19 bp, Artificial Sequence
  Description of Artificial Sequence: Synthetic oligonucleotide
tcctccgggcctcgctgta

SEQ ID NO: 5479 - DNA, 19 bp, Artificial Sequence
  Description of Artificial Sequence: Synthetic oligonucleotide
ctcctccgggcctcgctgt

SEQ ID NO: 5480 - DNA, 19 bp, Artificial Sequence
  Description of Artificial Sequence: Synthetic oligonucleotide
gctcctccgggcctcgctg

SEQ ID NO: 5481 - DNA, 19 bp, Artificial Sequence
  Description of Artificial Sequence: Synthetic oligonucleotide
ggctcctccgggcctcgct

SEQ ID NO: 5482 - DNA, 19 bp, Artificial Sequence
  Description of Artificial Sequence: Synthetic oligonucleotide
gggctcctccgggcctcgc

SEQ ID NO: 5483 - DNA, 19 bp, Artificial Sequence
  Description of Artificial Sequence: Synthetic oligonucleotide
ggggctcctccgggcctcg

SEQ ID NO: 5484 - DNA, 19 bp, Artificial Sequence
  Description of Artificial Sequence: Synthetic oligonucleotide
cggggctcctccgggcctc

SEQ ID NO: 5485 - DNA, 19 bp, Artificial Sequence
  Description of Artificial Sequence: Synthetic oligonucleotide
tcggggctcctccgggcct

SEQ ID NO: 5486 - DNA, 19 bp, Artificial Sequence
  Description of Artificial Sequence: Synthetic oligonucleotide
ctcggggctcctccgggcc

SEQ ID NO: 5487 - DNA, 19 bp, Artificial Sequence
  Description of Artificial Sequence: Synthetic oligonucleotide
tctcggggctcctccgggc

SEQ ID NO: 5488 - DNA, 19 bp, Artificial Sequence
  Description of Artificial Sequence: Synthetic oligonucleotide
atctcggggctcctccggg

SEQ ID NO: 5489 - DNA, 19 bp, Artificial Sequence
  Description of Artificial Sequence: Synthetic oligonucleotide
catctcggggctcctccgg

SEQ ID NO: 5490 - DNA, 19 bp, Artificial Sequence
  Description of Artificial Sequence: Synthetic oligonucleotide
acatctcggggctcctccg

SEQ ID NO: 5491 - DNA, 19 bp, Artificial Sequence
  Description of Artificial Sequence: Synthetic oligonucleotide
gacatctcggggctcctcc

SEQ ID NO: 5492 - DNA, 19 bp, Artificial Sequence
  Description of Artificial Sequence: Synthetic oligonucleotide
ggacatctcggggctcctc

SEQ ID NO: 5493 - DNA, 19 bp, Artificial Sequence
  Description of Artificial Sequence: Synthetic oligonucleotide
gggacatctcggggctcct

SEQ ID NO: 5494 - DNA, 19 bp, Artificial Sequence
  Description of Artificial Sequence: Synthetic oligonucleotide
cgggacatctcggggctcc

SEQ ID NO: 5495 - DNA, 19 bp, Artificial Sequence
  Description of Artificial Sequence: Synthetic oligonucleotide
acgggacatctcggggctc

SEQ ID NO: 5496 - DNA, 19 bp, Artificial Sequence
  Description of Artificial Sequence: Synthetic oligonucleotide
cacgggacatctcggggct

SEQ ID NO: 5497 - DNA, 19 bp, Artificial Sequence
  Description of Artificial Sequence: Synthetic oligonucleotide
acacgggacatctcggggc

SEQ ID NO: 5498 - DNA, 19 bp, Artificial Sequence
  Description of Artificial Sequence: Synthetic oligonucleotide
cacacgggacatctcgggg

SEQ ID NO: 5499 - DNA, 19 bp, Artificial Sequence
  Description of Artificial Sequence: Synthetic oligonucleotide
gcacacgggacatctcggg

SEQ ID NO: 5500 - DNA, 19 bp, Artificial Sequence
  Description of Artificial Sequence: Synthetic oligonucleotide
cgcacacgggacatctcgg

SEQ ID NO: 5501 - DNA, 19 bp, Artificial Sequence
  Description of Artificial Sequence: Synthetic oligonucleotide
gcgcacacgggacatctcg

SEQ ID NO: 5502 - DNA, 19 bp, Artificial Sequence
  Description of Artificial Sequence: Synthetic oligonucleotide
ggcgcacacgggacatctc

SEQ ID NO: 5503 - DNA, 19 bp, Artificial Sequence
  Description of Artificial Sequence: Synthetic oligonucleotide
cggcgcacacgggacatct

SEQ ID NO: 5504 - DNA, 19 bp, Artificial Sequence
  Description of Artificial Sequence: Synthetic oligonucleotide
gcggcgcacacgggacatc

SEQ ID NO: 5505 - DNA, 19 bp, Artificial Sequence
  Description of Artificial Sequence: Synthetic oligonucleotide
ggcggcgcacacgggacat

SEQ ID NO: 5506 - DNA, 19 bp, Artificial Sequence
  Description of Artificial Sequence: Synthetic oligonucleotide
aggcggcgcacacgggaca

SEQ ID NO: 5507 - DNA, 19 bp, Artificial Sequence
  Description of Artificial Sequence: Synthetic oligonucleotide
aaggcggcgcacacgggac

SEQ ID NO: 5508 - DNA, 19 bp, Artificial Sequence
  Description of Artificial Sequence: Synthetic oligonucleotide
gaaggcggcgcacacggga

SEQ ID NO: 5509 - DNA, 19 bp, Artificial Sequence
  Description of Artificial Sequence: Synthetic oligonucleotide
agaaggcggcgcacacggg

SEQ ID NO: 5510 - DNA, 19 bp, Artificial Sequence
  Description of Artificial Sequence: Synthetic oligonucleotide
cagaaggcggcgcacacgg

SEQ ID NO: 5511 - DNA, 19 bp, Artificial Sequence
  Description of Artificial Sequence: Synthetic oligonucleotide
gcagaaggcggcgcacacg

SEQ ID NO: 5512 - DNA, 19 bp, Artificial Sequence
  Description of Artificial Sequence: Synthetic oligonucleotide
agcagaaggcggcgcacac

SEQ ID NO: 5513 - DNA, 19 bp, Artificial Sequence
  Description of Artificial Sequence: Synthetic oligonucleotide
aagcagaaggcggcgcaca

SEQ ID NO: 5514 - DNA, 19 bp, Artificial Sequence
  Description of Artificial Sequence: Synthetic oligonucleotide
caagcagaaggcggcgcac

SEQ ID NO: 5515 - DNA, 19 bp, Artificial Sequence
  Description of Artificial Sequence: Synthetic oligonucleotide
ccaagcagaaggcggcgca

SEQ ID NO: 5516 - DNA, 19 bp, Artificial Sequence
  Description of Artificial Sequence: Synthetic oligonucleotide
tccaagcagaaggcggcgc

SEQ ID NO: 5517 - DNA, 19 bp, Artificial Sequence
  Description of Artificial Sequence: Synthetic oligonucleotide
atccaagcagaaggcggcg

SEQ ID NO: 5518 - DNA, 19 bp, Artificial Sequence
  Description of Artificial Sequence: Synthetic oligonucleotide
tatccaagcagaaggcggc

SEQ ID NO: 5519 - DNA, 19 bp, Artificial Sequence
  Description of Artificial Sequence: Synthetic oligonucleotide
gtatccaagcagaaggcgg

SEQ ID NO: 5520 - DNA, 19 bp, Artificial Sequence
  Description of Artificial Sequence: Synthetic oligonucleotide
ggtatccaagcagaaggcg

SEQ ID NO: 5521 - DNA, 19 bp, Artificial Sequence
  Description of Artificial Sequence: Synthetic oligonucleotide
aggtatccaagcagaaggc

SEQ ID NO: 5522 - DNA, 19 bp, Artificial Sequence
  Description of Artificial Sequence: Synthetic oligonucleotide
caggtatccaagcagaagg

SEQ ID NO: 5523 - DNA, 19 bp, Artificial Sequence
  Description of Artificial Sequence: Synthetic oligonucleotide
acaggtatccaagcagaag

SEQ ID NO: 5524 - DNA, 19 bp, Artificial Sequence
  Description of Artificial Sequence: Synthetic oligonucleotide
aacaggtatccaagcagaa

SEQ ID NO: 5525 - DNA, 19 bp, Artificial Sequence
  Description of Artificial Sequence: Synthetic oligonucleotide
gaacaggtatccaagcaga

SEQ ID NO: 5526 - DNA, 19 bp, Artificial Sequence
  Description of Artificial Sequence: Synthetic oligonucleotide
ggaacaggtatccaagcag

SEQ ID NO: 5527 - DNA, 19 bp, Artificial Sequence
  Description of Artificial Sequence: Synthetic oligonucleotide
gggaacaggtatccaagca

SEQ ID NO: 5528 - DNA, 19 bp, Artificial Sequence
  Description of Artificial Sequence: Synthetic oligonucleotide
tgggaacaggtatccaagc

SEQ ID NO: 5529 - DNA, 19 bp, Artificial Sequence
  Description of Artificial Sequence: Synthetic oligonucleotide
ctgggaacaggtatccaag

SEQ ID NO: 5530 - DNA, 19 bp, Artificial Sequence
  Description of Artificial Sequence: Synthetic oligonucleotide
gctgggaacaggtatccaa

SEQ ID NO: 5531 - DNA, 19 bp, Artificial Sequence
  Description of Artificial Sequence: Synthetic oligonucleotide
ggctgggaacaggtatcca

SEQ ID NO: 5532 - DNA, 19 bp, Artificial Sequence
  Description of Artificial Sequence: Synthetic oligonucleotide
gggctgggaacaggtatcc

SEQ ID NO: 5533 - DNA, 19 bp, Artificial Sequence
  Description of Artificial Sequence: Synthetic oligonucleotide
agggctgggaacaggtatc

SEQ ID NO: 5534 - DNA, 19 bp, Artificial Sequence
  Description of Artificial Sequence: Synthetic oligonucleotide
gagggctgggaacaggtat

SEQ ID NO: 5535 - DNA, 19 bp, Artificial Sequence
  Description of Artificial Sequence: Synthetic oligonucleotide
ggagggctgggaacaggta

SEQ ID NO: 5536 - DNA, 19 bp, Artificial Sequence
  Description of Artificial Sequence: Synthetic oligonucleotide
aggagggctgggaacaggt

SEQ ID NO: 5537 - DNA, 19 bp, Artificial Sequence
  Description of Artificial Sequence: Synthetic oligonucleotide
caggagggctgggaacagg

SEQ ID NO: 5538 - DNA, 19 bp, Artificial Sequence
  Description of Artificial Sequence: Synthetic oligonucleotide
acaggagggctgggaacag

SEQ ID NO: 5539 - DNA, 19 bp, Artificial Sequence
  Description of Artificial Sequence: Synthetic oligonucleotide
aacaggagggctgggaaca

SEQ ID NO: 5540 - DNA, 19 bp, Artificial Sequence
  Description of Artificial Sequence: Synthetic oligonucleotide
caacaggagggctgggaac

SEQ ID NO: 5541 - DNA, 19 bp, Artificial Sequence
  Description of Artificial Sequence: Synthetic oligonucleotide
gcaacaggagggctgggaa

SEQ ID NO: 5542 - DNA, 19 bp, Artificial Sequence
  Description of Artificial Sequence: Synthetic oligonucleotide
tgcaacaggagggctggga

SEQ ID NO: 5543 - DNA, 19 bp, Artificial Sequence
  Description of Artificial Sequence: Synthetic oligonucleotide
atgcaacaggagggctggg

SEQ ID NO: 5544 - DNA, 19 bp, Artificial Sequence
  Description of Artificial Sequence: Synthetic oligonucleotide
catgcaacaggagggctgg

SEQ ID NO: 5545 - DNA, 19 bp, Artificial Sequence
  Description of Artificial Sequence: Synthetic oligonucleotide
ccatgcaacaggagggctg

SEQ ID NO: 5546 - DNA, 19 bp, Artificial Sequence
  Description of Artificial Sequence: Synthetic oligonucleotide
cccatgcaacaggagggct

SEQ ID NO: 5547 - DNA, 19 bp, Artificial Sequence
  Description of Artificial Sequence: Synthetic oligonucleotide
gcccatgcaacaggagggc

SEQ ID NO: 5548 - DNA, 19 bp, Artificial Sequence
  Description of Artificial Sequence: Synthetic oligonucleotide
agcccatgcaacaggaggg

SEQ ID NO: 5549 - DNA, 19 bp, Artificial Sequence
  Description of Artificial Sequence: Synthetic oligonucleotide
cagcccatgcaacaggagg

SEQ ID NO: 5550 - DNA, 19 bp, Artificial Sequence
  Description of Artificial Sequence: Synthetic oligonucleotide
ccagcccatgcaacaggag

SEQ ID NO: 5551 - DNA, 19 bp, Artificial Sequence
  Description of Artificial Sequence: Synthetic oligonucleotide
cccagcccatgcaacagga

SEQ ID NO: 5552 - DNA, 19 bp, Artificial Sequence
  Description of Artificial Sequence: Synthetic oligonucleotide
tcccagcccatgcaacagg

SEQ ID NO: 5553 - DNA, 19 bp, Artificial Sequence
  Description of Artificial Sequence: Synthetic oligonucleotide
ctcccagcccatgcaacag

SEQ ID NO: 5554 - DNA, 19 bp, Artificial Sequence
  Description of Artificial Sequence: Synthetic oligonucleotide
tctcccagcccatgcaaca

SEQ ID NO: 5555 - DNA, 19 bp, Artificial Sequence
  Description of Artificial Sequence: Synthetic oligonucleotide
ctctcccagcccatgcaac

SEQ ID NO: 5556 - DNA, 19 bp, Artificial Sequence
  Description of Artificial Sequence: Synthetic oligonucleotide
cctctcccagcccatgcaa

SEQ ID NO: 5557 - DNA, 19 bp, Artificial Sequence
  Description of Artificial Sequence: Synthetic oligonucleotide
ccctctcccagcccatgca

SEQ ID NO: 5558 - DNA, 19 bp, Artificial Sequence
  Description of Artificial Sequence: Synthetic oligonucleotide
gccctctcccagcccatgc

SEQ ID NO: 5559 - DNA, 19 bp, Artificial Sequence
  Description of Artificial Sequence: Synthetic oligonucleotide
agccctctcccagcccatg

SEQ ID NO: 5560 - DNA, 19 bp, Artificial Sequence
  Description of Artificial Sequence: Synthetic oligonucleotide
gagccctctcccagcccat

SEQ ID NO: 5561 - DNA, 19 bp, Artificial Sequence
  Description of Artificial Sequence: Synthetic oligonucleotide
agagccctctcccagccca

SEQ ID NO: 5562 - DNA, 19 bp, Artificial Sequence
  Description of Artificial Sequence: Synthetic oligonucleotide
cagagccctctcccagccc

SEQ ID NO: 5563 - DNA, 19 bp, Artificial Sequence
  Description of Artificial Sequence: Synthetic oligonucleotide
gcagagccctctcccagcc

SEQ ID NO: 5564 - DNA, 19 bp, Artificial Sequence
  Description of Artificial Sequence: Synthetic oligonucleotide
ggcagagccctctcccagc

SEQ ID NO: 5565 - DNA, 19 bp, Artificial Sequence
  Description of Artificial Sequence: Synthetic oligonucleotide
gggcagagccctctcccag

SEQ ID NO: 5566 - DNA, 19 bp, Artificial Sequence
  Description of Artificial Sequence: Synthetic oligonucleotide
agggcagagccctctccca

SEQ ID NO: 5567 - DNA, 19 bp, Artificial Sequence
  Description of Artificial Sequence: Synthetic oligonucleotide
gagggcagagccctctccc

SEQ ID NO: 5568 - DNA, 19 bp, Artificial Sequence
  Description of Artificial Sequence: Synthetic oligonucleotide
ggagggcagagccctctcc

SEQ ID NO: 5569 - DNA, 19 bp, Artificial Sequence
  Description of Artificial Sequence: Synthetic oligonucleotide
aggagggcagagccctctc

SEQ ID NO: 5570 - DNA, 19 bp, Artificial Sequence
  Description of Artificial Sequence: Synthetic oligonucleotide
aaggagggcagagccctct

SEQ ID NO: 5571 - DNA, 19 bp, Artificial Sequence
  Description of Artificial Sequence: Synthetic oligonucleotide
gaaggagggcagagccctc

SEQ ID NO: 5572 - DNA, 19 bp, Artificial Sequence
  Description of Artificial Sequence: Synthetic oligonucleotide
tgaaggagggcagagccct

SEQ ID NO: 5573 - DNA, 19 bp, Artificial Sequence
  Description of Artificial Sequence: Synthetic oligonucleotide
atgaaggagggcagagccc

SEQ ID NO: 5574 - DNA, 19 bp, Artificial Sequence
  Description of Artificial Sequence: Synthetic oligonucleotide
gatgaaggagggcagagcc

SEQ ID NO: 5575 - DNA, 19 bp, Artificial Sequence
  Description of Artificial Sequence: Synthetic oligonucleotide
ggatgaaggagggcagagc

SEQ ID NO: 5576 - DNA, 19 bp, Artificial Sequence
  Description of Artificial Sequence: Synthetic oligonucleotide
tggatgaaggagggcagag

SEQ ID NO: 5577 - DNA, 19 bp, Artificial Sequence
  Description of Artificial Sequence: Synthetic oligonucleotide
ctggatgaaggagggcaga

SEQ ID NO: 5578 - DNA, 19 bp, Artificial Sequence
  Description of Artificial Sequence: Synthetic oligonucleotide
tctggatgaaggagggcag

SEQ ID NO: 5579 - DNA, 19 bp, Artificial Sequence
  Description of Artificial Sequence: Synthetic oligonucleotide
gtctggatgaaggagggca

SEQ ID NO: 5580 - DNA, 19 bp, Artificial Sequence
  Description of Artificial Sequence: Synthetic oligonucleotide
tgtctggatgaaggagggc

SEQ ID NO: 5581 - DNA, 19 bp, Artificial Sequence
  Description of Artificial Sequence: Synthetic oligonucleotide
ctgtctggatgaaggaggg

SEQ ID NO: 5582 - DNA, 19 bp, Artificial Sequence
  Description of Artificial Sequence: Synthetic oligonucleotide
gctgtctggatgaaggagg

SEQ ID NO: 5583 - DNA, 19 bp, Artificial Sequence
  Description of Artificial Sequence: Synthetic oligonucleotide
tgctgtctggatgaaggag

SEQ ID NO: 5584 - DNA, 19 bp, Artificial Sequence
  Description of Artificial Sequence: Synthetic oligonucleotide
ctgctgtctggatgaagga

SEQ ID NO: 5585 - DNA, 19 bp, Artificial Sequence
  Description of Artificial Sequence: Synthetic oligonucleotide
tctgctgtctggatgaagg

SEQ ID NO: 5586 - DNA, 19 bp, Artificial Sequence
  Description of Artificial Sequence: Synthetic oligonucleotide
atctgctgtctggatgaag

SEQ ID NO: 5587 - DNA, 19 bp, Artificial Sequence
  Description of Artificial Sequence: Synthetic oligonucleotide
gatctgctgtctggatgaa

SEQ ID NO: 5588 - DNA, 19 bp, Artificial Sequence
  Description of Artificial Sequence: Synthetic oligonucleotide
cgatctgctgtctggatga

SEQ ID NO: 5589 - DNA, 19 bp, Artificial Sequence
  Description of Artificial Sequence: Synthetic oligonucleotide
gcgatctgctgtctggatg

SEQ ID NO: 5590 - DNA, 19 bp, Artificial Sequence
  Description of Artificial Sequence: Synthetic oligonucleotide
tgcgatctgctgtctggat

SEQ ID NO: 5591 - DNA, 19 bp, Artificial Sequence
  Description of Artificial Sequence: Synthetic oligonucleotide
gtgcgatctgctgtctgga

SEQ ID NO: 5592 - DNA, 19 bp, Artificial Sequence
  Description of Artificial Sequence: Synthetic oligonucleotide
ggtgcgatctgctgtctgg

SEQ ID NO: 5593 - DNA, 19 bp, Artificial Sequence
  Description of Artificial Sequence: Synthetic oligonucleotide
gggtgcgatctgctgtctg

SEQ ID NO: 5594 - DNA, 19 bp, Artificial Sequence
  Description of Artificial Sequence: Synthetic oligonucleotide
agggtgcgatctgctgtct

SEQ ID NO: 5595 - DNA, 19 bp, Artificial Sequence
  Description of Artificial Sequence: Synthetic oligonucleotide
gagggtgcgatctgctgtc

SEQ ID NO: 5596 - DNA, 19 bp, Artificial Sequence
  Description of Artificial Sequence: Synthetic oligonucleotide
cgagggtgcgatctgctgt

SEQ ID NO: 5597 - DNA, 19 bp, Artificial Sequence
  Description of Artificial Sequence: Synthetic oligonucleotide
ccgagggtgcgatctgctg

SEQ ID NO: 5598 - DNA, 19 bp, Artificial Sequence
  Description of Artificial Sequence: Synthetic oligonucleotide
accgagggtgcgatctgct

SEQ ID NO: 5599 - DNA, 19 bp, Artificial Sequence
  Description of Artificial Sequence: Synthetic oligonucleotide
gaccgagggtgcgatctgc

SEQ ID NO: 5600 - DNA, 19 bp, Artificial Sequence
  Description of Artificial Sequence: Synthetic oligonucleotide
ggaccgagggtgcgatctg

SEQ ID NO: 5601 - DNA, 19 bp, Artificial Sequence
  Description of Artificial Sequence: Synthetic oligonucleotide
aggaccgagggtgcgatct

SEQ ID NO: 5602 - DNA, 19 bp, Artificial Sequence
  Description of Artificial Sequence: Synthetic oligonucleotide
aaggaccgagggtgcgatc

SEQ ID NO: 5603 - DNA, 19 bp, Artificial Sequence
  Description of Artificial Sequence: Synthetic oligonucleotide
taaggaccgagggtgcgat

SEQ ID NO: 5604 - DNA, 19 bp, Artificial Sequence
  Description of Artificial Sequence: Synthetic oligonucleotide
ctaaggaccgagggtgcga

SEQ ID NO: 5605 - DNA, 19 bp, Artificial Sequence
  Description of Artificial Sequence: Synthetic oligonucleotide
tctaaggaccgagggtgcg

SEQ ID NO: 5606 - DNA, 19 bp, Artificial Sequence
  Description of Artificial Sequence: Synthetic oligonucleotide
ctctaaggaccgagggtgc

SEQ ID NO: 5607 - DNA, 19 bp, Artificial Sequence
  Description of Artificial Sequence: Synthetic oligonucleotide
tctctaaggaccgagggtg

SEQ ID NO: 5608 - DNA, 19 bp, Artificial Sequence
  Description of Artificial Sequence: Synthetic oligonucleotide
ttctctaaggaccgagggt

SEQ ID NO: 5609 - DNA, 19 bp, Artificial Sequence
  Description of Artificial Sequence: Synthetic oligonucleotide
tttctctaaggaccgaggg

SEQ ID NO: 5610 - DNA, 19 bp, Artificial Sequence
  Description of Artificial Sequence: Synthetic oligonucleotide
ttttctctaaggaccgagg

SEQ ID NO: 5611 - DNA, 19 bp, Artificial Sequence
  Description of Artificial Sequence: Synthetic oligonucleotide
cttttctctaaggaccgag

SEQ ID NO: 5612 - DNA, 19 bp, Artificial Sequence
  Description of Artificial Sequence: Synthetic oligonucleotide
gcttttctctaaggaccga

SEQ ID NO: 5613 - DNA, 19 bp, Artificial Sequence
  Description of Artificial Sequence: Synthetic oligonucleotide
cgcttttctctaaggaccg

SEQ ID NO: 5614 - DNA, 19 bp, Artificial Sequence
  Description of Artificial Sequence: Synthetic oligonucleotide
gcgcttttctctaaggacc

SEQ ID NO: 5615 - DNA, 19 bp, Artificial Sequence
  Description of Artificial Sequence: Synthetic oligonucleotide
ggcgcttttctctaaggac

SEQ ID NO: 5616 - DNA, 19 bp, Artificial Sequence
  Description of Artificial Sequence: Synthetic oligonucleotide
aggcgcttttctctaagga

SEQ ID NO: 5617 - DNA, 19 bp, Artificial Sequence
  Description of Artificial Sequence: Synthetic oligonucleotide
caggcgcttttctctaagg

SEQ ID NO: 5618 - DNA, 19 bp, Artificial Sequence
  Description of Artificial Sequence: Synthetic oligonucleotide
ccaggcgcttttctctaag

SEQ ID NO: 5619 - DNA, 19 bp, Artificial Sequence
  Description of Artificial Sequence: Synthetic oligonucleotide
tccaggcgcttttctctaa

SEQ ID NO: 5620 - DNA, 19 bp, Artificial Sequence
  Description of Artificial Sequence: Synthetic oligonucleotide
ctccaggcgcttttctcta

SEQ ID NO: 5621 - DNA, 19 bp, Artificial Sequence
  Description of Artificial Sequence: Synthetic oligonucleotide
cctccaggcgcttttctct

SEQ ID NO: 5622 - DNA, 19 bp, Artificial Sequence
  Description of Artificial Sequence: Synthetic oligonucleotide
ccctccaggcgcttttctc

SEQ ID NO: 5623 - DNA, 19 bp, Artificial Sequence
  Description of Artificial Sequence: Synthetic oligonucleotide
gccctccaggcgcttttct

SEQ ID NO: 5624 - DNA, 19 bp, Artificial Sequence
  Description of Artificial Sequence: Synthetic oligonucleotide
agccctccaggcgcttttc

SEQ ID NO: 5625 - DNA, 19 bp, Artificial Sequence
  Description of Artificial Sequence: Synthetic oligonucleotide
aagccctccaggcgctttt

SEQ ID NO: 5626 - DNA, 19 bp, Artificial Sequence
  Description of Artificial Sequence: Synthetic oligonucleotide
aaagccctccaggcgcttt

SEQ ID NO: 5627 - DNA, 19 bp, Artificial Sequence
  Description of Artificial Sequence: Synthetic oligonucleotide
gaaagccctccaggcgctt

SEQ ID NO: 5628 - DNA, 19 bp, Artificial Sequence
  Description of Artificial Sequence: Synthetic oligonucleotide
tgaaagccctccaggcgct

SEQ ID NO: 5629 - DNA, 19 bp, Artificial Sequence
  Description of Artificial Sequence: Synthetic oligonucleotide
ttgaaagccctccaggcgc

SEQ ID NO: 5630 - DNA, 19 bp, Artificial Sequence
  Description of Artificial Sequence: Synthetic oligonucleotide
cttgaaagccctccaggcg

SEQ ID NO: 5631 - DNA, 19 bp, Artificial Sequence
  Description of Artificial Sequence: Synthetic oligonucleotide
ccttgaaagccctccaggc

SEQ ID NO: 5632 - DNA, 19 bp, Artificial Sequence
  Description of Artificial Sequence: Synthetic oligonucleotide
tccttgaaagccctccagg

SEQ ID NO: 5633 - DNA, 19 bp, Artificial Sequence
  Description of Artificial Sequence: Synthetic oligonucleotide
ctccttgaaagccctccag

SEQ ID NO: 5634 - DNA, 19 bp, Artificial Sequence
  Description of Artificial Sequence: Synthetic oligonucleotide
actccttgaaagccctcca

SEQ ID NO: 5635 - DNA, 19 bp, Artificial Sequence
  Description of Artificial Sequence: Synthetic oligonucleotide
gactccttgaaagccctcc

SEQ ID NO: 5636 - DNA, 19 bp, Artificial Sequence
  Description of Artificial Sequence: Synthetic oligonucleotide
tgactccttgaaagccctc

SEQ ID NO: 5637 - DNA, 19 bp, Artificial Sequence
  Description of Artificial Sequence: Synthetic oligonucleotide
gtgactccttgaaagccct

SEQ ID NO: 5638 - DNA, 19 bp, Artificial Sequence
  Description of Artificial Sequence: Synthetic oligonucleotide
tgtgactccttgaaagccc

SEQ ID NO: 5639 - DNA, 19 bp, Artificial Sequence
  Description of Artificial Sequence: Synthetic oligonucleotide
ctgtgactccttgaaagcc

SEQ ID NO: 5640 - DNA, 19 bp, Artificial Sequence
  Description of Artificial Sequence: Synthetic oligonucleotide
actgtgactccttgaaagc

SEQ ID NO: 5641 - DNA, 19 bp, Artificial Sequence
  Description of Artificial Sequence: Synthetic oligonucleotide
cactgtgactccttgaaag

SEQ ID NO: 5642 - DNA, 19 bp, Artificial Sequence
  Description of Artificial Sequence: Synthetic oligonucleotide
acactgtgactccttgaaa

SEQ ID NO: 5643 - DNA, 19 bp, Artificial Sequence
  Description of Artificial Sequence: Synthetic oligonucleotide
gacactgtgactccttgaa

SEQ ID NO: 5644 - DNA, 19 bp, Artificial Sequence
  Description of Artificial Sequence: Synthetic oligonucleotide
tgacactgtgactccttga

SEQ ID NO: 5645 - DNA, 19 bp, Artificial Sequence
  Description of Artificial Sequence: Synthetic oligonucleotide
atgacactgtgactccttg

SEQ ID NO: 5646 - DNA, 19 bp, Artificial Sequence
  Description of Artificial Sequence: Synthetic oligonucleotide
gatgacactgtgactcctt

SEQ ID NO: 5647 - DNA, 19 bp, Artificial Sequence
  Description of Artificial Sequence: Synthetic oligonucleotide
tgatgacactgtgactcct

SEQ ID NO: 5648 - DNA, 19 bp, Artificial Sequence
  Description of Artificial Sequence: Synthetic oligonucleotide
gtgatgacactgtgactcc

SEQ ID NO: 5649 - DNA, 19 bp, Artificial Sequence
  Description of Artificial Sequence: Synthetic oligonucleotide
tgtgatgacactgtgactc

SEQ ID NO: 5650 - DNA, 19 bp, Artificial Sequence
  Description of Artificial Sequence: Synthetic oligonucleotide
atgtgatgacactgtgact

SEQ ID NO: 5651 - DNA, 19 bp, Artificial Sequence
  Description of Artificial Sequence: Synthetic oligonucleotide
catgtgatgacactgtgac

SEQ ID NO: 5652 - DNA, 19 bp, Artificial Sequence
  Description of Artificial Sequence: Synthetic oligonucleotide
gcatgtgatgacactgtga

SEQ ID NO: 5653 - DNA, 19 bp, Artificial Sequence
  Description of Artificial Sequence: Synthetic oligonucleotide
agcatgtgatgacactgtg

SEQ ID NO: 5654 - DNA, 19 bp, Artificial Sequence
  Description of Artificial Sequence: Synthetic oligonucleotide
cagcatgtgatgacactgt

SEQ ID NO: 5655 - DNA, 19 bp, Artificial Sequence
  Description of Artificial Sequence: Synthetic oligonucleotide
tcagcatgtgatgacactg

SEQ ID NO: 5656 - DNA, 19 bp, Artificial Sequence
  Description of Artificial Sequence: Synthetic oligonucleotide
ttcagcatgtgatgacact

SEQ ID NO: 5657 - DNA, 19 bp, Artificial Sequence
  Description of Artificial Sequence: Synthetic oligonucleotide
cttcagcatgtgatgacac

SEQ ID NO: 5658 - DNA, 19 bp, Artificial Sequence
  Description of Artificial Sequence: Synthetic oligonucleotide
gcttcagcatgtgatgaca

SEQ ID NO: 5659 - DNA, 19 bp, Artificial Sequence
  Description of Artificial Sequence: Synthetic oligonucleotide
tgcttcagcatgtgatgac

SEQ ID NO: 5660 - DNA, 19 bp, Artificial Sequence
  Description of Artificial Sequence: Synthetic oligonucleotide
atgcttcagcatgtgatga

SEQ ID NO: 5661 - DNA, 19 bp, Artificial Sequence
  Description of Artificial Sequence: Synthetic oligonucleotide
gatgcttcagcatgtgatg

SEQ ID NO: 5662 - DNA, 19 bp, Artificial Sequence
  Description of Artificial Sequence: Synthetic oligonucleotide
agatgcttcagcatgtgat

SEQ ID NO: 5663 - DNA, 19 bp, Artificial Sequence
  Description of Artificial Sequence: Synthetic oligonucleotide
gagatgcttcagcatgtga

SEQ ID NO: 5664 - DNA, 19 bp, Artificial Sequence
  Description of Artificial Sequence: Synthetic oligonucleotide
ggagatgcttcagcatgtg

SEQ ID NO: 5665 - DNA, 19 bp, Artificial Sequence
  Description of Artificial Sequence: Synthetic oligonucleotide
tggagatgcttcagcatgt

SEQ ID NO: 5666 - DNA, 19 bp, Artificial Sequence
  Description of Artificial Sequence: Synthetic oligonucleotide
gtggagatgcttcagcatg

SEQ ID NO: 5667 - DNA, 19 bp, Artificial Sequence
  Description of Artificial Sequence: Synthetic oligonucleotide
tgtggagatgcttcagcat

SEQ ID NO: 5668 - DNA, 19 bp, Artificial Sequence
  Description of Artificial Sequence: Synthetic oligonucleotide
ttgtggagatgcttcagca

SEQ ID NO: 5669 - DNA, 19 bp, Artificial Sequence
  Description of Artificial Sequence: Synthetic oligonucleotide
gttgtggagatgcttcagc

SEQ ID NO: 5670 - DNA, 19 bp, Artificial Sequence
  Description of Artificial Sequence: Synthetic oligonucleotide
cgttgtggagatgcttcag

SEQ ID NO: 5671 - DNA, 19 bp, Artificial Sequence
  Description of Artificial Sequence: Synthetic oligonucleotide
ccgttgtggagatgcttca

SEQ ID NO: 5672 - DNA, 19 bp, Artificial Sequence
  Description of Artificial Sequence: Synthetic oligonucleotide
accgttgtggagatgcttc

SEQ ID NO: 5673 - DNA, 19 bp, Artificial Sequence
  Description of Artificial Sequence: Synthetic oligonucleotide
caccgttgtggagatgctt

SEQ ID NO: 5674 - DNA, 19 bp, Artificial Sequence
  Description of Artificial Sequence: Synthetic oligonucleotide
gcaccgttgtggagatgct

SEQ ID NO: 5675 - DNA, 19 bp, Artificial Sequence
  Description of Artificial Sequence: Synthetic oligonucleotide
cgcaccgttgtggagatgc

SEQ ID NO: 5676 - DNA, 19 bp, Artificial Sequence
  Description of Artificial Sequence: Synthetic oligonucleotide
gcgcaccgttgtggagatg

SEQ ID NO: 5677 - DNA, 19 bp, Artificial Sequence
  Description of Artificial Sequence: Synthetic oligonucleotide
cgcgcaccgttgtggagat

SEQ ID NO: 5678 - DNA, 19 bp, Artificial Sequence
  Description of Artificial Sequence: Synthetic oligonucleotide
ccgcgcaccgttgtggaga

SEQ ID NO: 5679 - DNA, 19 bp, Artificial Sequence
  Description of Artificial Sequence: Synthetic oligonucleotide
tccgcgcaccgttgtggag

SEQ ID NO: 5680 - DNA, 19 bp, Artificial Sequence
  Description of Artificial Sequence: Synthetic oligonucleotide
atccgcgcaccgttgtgga

SEQ ID NO: 5681 - DNA, 19 bp, Artificial Sequence
  Description of Artificial Sequence: Synthetic oligonucleotide
gatccgcgcaccgttgtgg

SEQ ID NO: 5682 - DNA, 19 bp, Artificial Sequence
  Description of Artificial Sequence: Synthetic oligonucleotide
tgatccgcgcaccgttgtg

SEQ ID NO: 5683 - DNA, 19 bp, Artificial Sequence
  Description of Artificial Sequence: Synthetic oligonucleotide
gtgatccgcgcaccgttgt

SEQ ID NO: 5684 - DNA, 19 bp, Artificial Sequence
  Description of Artificial Sequence: Synthetic oligonucleotide
tgtgatccgcgcaccgttg

SEQ ID NO: 5685 - DNA, 19 bp, Artificial Sequence
  Description of Artificial Sequence: Synthetic oligonucleotide
ctgtgatccgcgcaccgtt

SEQ ID NO: 5686 - DNA, 19 bp, Artificial Sequence
  Description of Artificial Sequence: Synthetic oligonucleotide
actgtgatccgcgcaccgt

SEQ ID NO: 5687 - DNA, 19 bp, Artificial Sequence
  Description of Artificial Sequence: Synthetic oligonucleotide
cactgtgatccgcgcaccg

SEQ ID NO: 5688 - DNA, 19 bp, Artificial Sequence
  Description of Artificial Sequence: Synthetic oligonucleotide
gcactgtgatccgcgcacc

SEQ ID NO: 5689 - DNA, 19 bp, Artificial Sequence
  Description of Artificial Sequence: Synthetic oligonucleotide
tgcactgtgatccgcgcac

SEQ ID NO: 5690 - DNA, 19 bp, Artificial Sequence
  Description of Artificial Sequence: Synthetic oligonucleotide
ctgcactgtgatccgcgca

SEQ ID NO: 5691 - DNA, 19 bp, Artificial Sequence
  Description of Artificial Sequence: Synthetic oligonucleotide
tctgcactgtgatccgcgc

SEQ ID NO: 5692 - DNA, 19 bp, Artificial Sequence
  Description of Artificial Sequence: Synthetic oligonucleotide
atctgcactgtgatccgcg

SEQ ID NO: 5693 - DNA, 19 bp, Artificial Sequence
  Description of Artificial Sequence: Synthetic oligonucleotide
catctgcactgtgatccgc

SEQ ID NO: 5694 - DNA, 19 bp, Artificial Sequence
  Description of Artificial Sequence: Synthetic oligonucleotide
gcatctgcactgtgatccg

SEQ ID NO: 5695 - DNA, 19 bp, Artificial Sequence
  Description of Artificial Sequence: Synthetic oligonucleotide
ggcatctgcactgtgatcc

SEQ ID NO: 5696 - DNA, 19 bp, Artificial Sequence
  Description of Artificial Sequence: Synthetic oligonucleotide
gggcatctgcactgtgatc

SEQ ID NO: 5697 - DNA, 19 bp, Artificial Sequence
  Description of Artificial Sequence: Synthetic oligonucleotide
ggggcatctgcactgtgat

SEQ ID NO: 5698 - DNA, 19 bp, Artificial Sequence
  Description of Artificial Sequence: Synthetic oligonucleotide
gggggcatctgcactgtga

SEQ ID NO: 5699 - DNA, 19 bp, Artificial Sequence
  Description of Artificial Sequence: Synthetic oligonucleotide
cgggggcatctgcactgtg

SEQ ID NO: 5700 - DNA, 19 bp, Artificial Sequence
  Description of Artificial Sequence: Synthetic oligonucleotide
tcgggggcatctgcactgt

SEQ ID NO: 5701 - DNA, 19 bp, Artificial Sequence
  Description of Artificial Sequence: Synthetic oligonucleotide
gtcgggggcatctgcactg

SEQ ID NO: 5702 - DNA, 19 bp, Artificial Sequence
  Description of Artificial Sequence: Synthetic oligonucleotide
ggtcgggggcatctgcact

SEQ ID NO: 5703 - DNA, 19 bp, Artificial Sequence
  Description of Artificial Sequence: Synthetic oligonucleotide
tggtcgggggcatctgcac

SEQ ID NO: 5704 - DNA, 19 bp, Artificial Sequence
  Description of Artificial Sequence: Synthetic oligonucleotide
atggtcgggggcatctgca

SEQ ID NO: 5705 - DNA, 19 bp, Artificial Sequence
  Description of Artificial Sequence: Synthetic oligonucleotide
gatggtcgggggcatctgc

SEQ ID NO: 5706 - DNA, 19 bp, Artificial Sequence
  Description of Artificial Sequence: Synthetic oligonucleotide
cgatggtcgggggcatctg

SEQ ID NO: 5707 - DNA, 19 bp, Artificial Sequence
  Description of Artificial Sequence: Synthetic oligonucleotide
tcgatggtcgggggcatct

SEQ ID NO: 5708 - DNA, 19 bp, Artificial Sequence
  Description of Artificial Sequence: Synthetic oligonucleotide
ctcgatggtcgggggcatc

SEQ ID NO: 5709 - DNA, 19 bp, Artificial Sequence
  Description of Artificial Sequence: Synthetic oligonucleotide
cctcgatggtcgggggcat

SEQ ID NO: 5710 - DNA, 19 bp, Artificial Sequence
  Description of Artificial Sequence: Synthetic oligonucleotide
ccctcgatggtcgggggca

SEQ ID NO: 5711 - DNA, 19 bp, Artificial Sequence
  Description of Artificial Sequence: Synthetic oligonucleotide
gccctcgatggtcgggggc

SEQ ID NO: 5712 - DNA, 19 bp, Artificial Sequence
  Description of Artificial Sequence: Synthetic oligonucleotide
ggccctcgatggtcggggg

SEQ ID NO: 5713 - DNA, 19 bp, Artificial Sequence
  Description of Artificial Sequence: Synthetic oligonucleotide
tggccctcgatggtcgggg

SEQ ID NO: 5714 - DNA, 19 bp, Artificial Sequence
  Description of Artificial Sequence: Synthetic oligonucleotide
gtggccctcgatggtcggg

SEQ ID NO: 5715 - DNA, 19 bp, Artificial Sequence
  Description of Artificial Sequence: Synthetic oligonucleotide
agtggccctcgatggtcgg

SEQ ID NO: 5716 - DNA, 19 bp, Artificial Sequence
  Description of Artificial Sequence: Synthetic oligonucleotide
cagtggccctcgatggtcg

SEQ ID NO: 5717 - DNA, 19 bp, Artificial Sequence
  Description of Artificial Sequence: Synthetic oligonucleotide
ccagtggccctcgatggtc

SEQ ID NO: 5718 - DNA, 19 bp, Artificial Sequence
  Description of Artificial Sequence: Synthetic oligonucleotide
cccagtggccctcgatggt

SEQ ID NO: 5719 - DNA, 19 bp, Artificial Sequence
  Description of Artificial Sequence: Synthetic oligonucleotide
acccagtggccctcgatgg

SEQ ID NO: 5720 - DNA, 19 bp, Artificial Sequence
  Description of Artificial Sequence: Synthetic oligonucleotide
cacccagtggccctcgatg

SEQ ID NO: 5721 - DNA, 19 bp, Artificial Sequence
  Description of Artificial Sequence: Synthetic oligonucleotide
acacccagtggccctcgat

SEQ ID NO: 5722 - DNA, 19 bp, Artificial Sequence
  Description of Artificial Sequence: Synthetic oligonucleotide
gacacccagtggccctcga

SEQ ID NO: 5723 - DNA, 19 bp, Artificial Sequence
  Description of Artificial Sequence: Synthetic oligonucleotide
ggacacccagtggccctcg

SEQ ID NO: 5724 - DNA, 19 bp, Artificial Sequence
  Description of Artificial Sequence: Synthetic oligonucleotide
tggacacccagtggccctc

SEQ ID NO: 5725 - DNA, 19 bp, Artificial Sequence
  Description of Artificial Sequence: Synthetic oligonucleotide
gtggacacccagtggccct

SEQ ID NO: 5726 - DNA, 19 bp, Artificial Sequence
  Description of Artificial Sequence: Synthetic oligonucleotide
tgtggacacccagtggccc

SEQ ID NO: 5727 - DNA, 19 bp, Artificial Sequence
  Description of Artificial Sequence: Synthetic oligonucleotide
ctgtggacacccagtggcc

SEQ ID NO: 5728 - DNA, 19 bp, Artificial Sequence
  Description of Artificial Sequence: Synthetic oligonucleotide
cctgtggacacccagtggc

SEQ ID NO: 5729 - DNA, 19 bp, Artificial Sequence
  Description of Artificial Sequence: Synthetic oligonucleotide
gcctgtggacacccagtgg

SEQ ID NO: 5730 - DNA, 19 bp, Artificial Sequence
  Description of Artificial Sequence: Synthetic oligonucleotide
agcctgtggacacccagtg

SEQ ID NO: 5731 - DNA, 19 bp, Artificial Sequence
  Description of Artificial Sequence: Synthetic oligonucleotide
cagcctgtggacacccagt

SEQ ID NO: 5732 - DNA, 19 bp, Artificial Sequence
  Description of Artificial Sequence: Synthetic oligonucleotide
acagcctgtggacacccag

SEQ ID NO: 5733 - DNA, 19 bp, Artificial Sequence
  Description of Artificial Sequence: Synthetic oligonucleotide
cacagcctgtggacaccca

SEQ ID NO: 5734 - DNA, 19 bp, Artificial Sequence
  Description of Artificial Sequence: Synthetic oligonucleotide
tcacagcctgtggacaccc

SEQ ID NO: 5735 - DNA, 19 bp, Artificial Sequence
  Description of Artificial Sequence: Synthetic oligonucleotide
ttcacagcctgtggacacc

SEQ ID NO: 5736 - DNA, 19 bp, Artificial Sequence
  Description of Artificial Sequence: Synthetic oligonucleotide
cttcacagcctgtggacac

SEQ ID NO: 5737 - DNA, 19 bp, Artificial Sequence
  Description of Artificial Sequence: Synthetic oligonucleotide
acttcacagcctgtggaca

SEQ ID NO: 5738 - DNA, 19 bp, Artificial Sequence
  Description of Artificial Sequence: Synthetic oligonucleotide
tacttcacagcctgtggac

SEQ ID NO: 5739 - DNA, 19 bp, Artificial Sequence
  Description of Artificial Sequence: Synthetic oligonucleotide
ttacttcacagcctgtgga

SEQ ID NO: 5740 - DNA, 19 bp, Artificial Sequence
  Description of Artificial Sequence: Synthetic oligonucleotide
cttacttcacagcctgtgg

SEQ ID NO: 5741 - DNA, 19 bp, Artificial Sequence
  Description of Artificial Sequence: Synthetic oligonucleotide
ccttacttcacagcctgtg

SEQ ID NO: 5742 - DNA, 19 bp, Artificial Sequence
  Description of Artificial Sequence: Synthetic oligonucleotide
accttacttcacagcctgt

SEQ ID NO: 5743 - DNA, 19 bp, Artificial Sequence
  Description of Artificial Sequence: Synthetic oligonucleotide
gaccttacttcacagcctg

SEQ ID NO: 5744 - DNA, 19 bp, Artificial Sequence
  Description of Artificial Sequence: Synthetic oligonucleotide
cgaccttacttcacagcct

SEQ ID NO: 5745 - DNA, 19 bp, Artificial Sequence
  Description of Artificial Sequence: Synthetic oligonucleotide
ccgaccttacttcacagcc

SEQ ID NO: 5746 - DNA, 19 bp, Artificial Sequence
  Description of Artificial Sequence: Synthetic oligonucleotide
cccgaccttacttcacagc

SEQ ID NO: 5747 - DNA, 19 bp, Artificial Sequence
  Description of Artificial Sequence: Synthetic oligonucleotide
acccgaccttacttcacag

SEQ ID NO: 5748 - DNA, 19 bp, Artificial Sequence
  Description of Artificial Sequence: Synthetic oligonucleotide
gacccgaccttacttcaca

SEQ ID NO: 5749 - DNA, 19 bp, Artificial Sequence
  Description of Artificial Sequence: Synthetic oligonucleotide
ggacccgaccttacttcac

SEQ ID NO: 5750 - DNA, 19 bp, Artificial Sequence
  Description of Artificial Sequence: Synthetic oligonucleotide
cggacccgaccttacttca

SEQ ID NO: 5751 - DNA, 19 bp, Artificial Sequence
  Description of Artificial Sequence: Synthetic oligonucleotide
ccggacccgaccttacttc

SEQ ID NO: 5752 - DNA, 19 bp, Artificial Sequence
  Description of Artificial Sequence: Synthetic oligonucleotide
tccggacccgaccttactt

SEQ ID NO: 5753 - DNA, 19 bp, Artificial Sequence
  Description of Artificial Sequence: Synthetic oligonucleotide
ctccggacccgaccttact

SEQ ID NO: 5754 - DNA, 19 bp, Artificial Sequence
  Description of Artificial Sequence: Synthetic oligonucleotide
actccggacccgaccttac

SEQ ID NO: 5755 - DNA, 19 bp, Artificial Sequence
  Description of Artificial Sequence: Synthetic oligonucleotide
aactccggacccgacctta

SEQ ID NO: 5756 - DNA, 19 bp, Artificial Sequence
  Description of Artificial Sequence: Synthetic oligonucleotide
gaactccggacccgacctt

SEQ ID NO: 5757 - DNA, 19 bp, Artificial Sequence
  Description of Artificial Sequence: Synthetic oligonucleotide
tgaactccggacccgacct

SEQ ID NO: 5758 - DNA, 19 bp, Artificial Sequence
  Description of Artificial Sequence: Synthetic oligonucleotide
atgaactccggacccgacc

SEQ ID NO: 5759 - DNA, 19 bp, Artificial Sequence
  Description of Artificial Sequence: Synthetic oligonucleotide
catgaactccggacccgac

SEQ ID NO: 5760 - DNA, 19 bp, Artificial Sequence
  Description of Artificial Sequence: Synthetic oligonucleotide
tcatgaactccggacccga

SEQ ID NO: 5761 - DNA, 19 bp, Artificial Sequence
  Description of Artificial Sequence: Synthetic oligonucleotide
gtcatgaactccggacccg

SEQ ID NO: 5762 - DNA, 19 bp, Artificial Sequence
  Description of Artificial Sequence: Synthetic oligonucleotide
tgtcatgaactccggaccc

SEQ ID NO: 5763 - DNA, 19 bp, Artificial Sequence
  Description of Artificial Sequence: Synthetic oligonucleotide
ttgtcatgaactccggacc

SEQ ID NO: 5764 - DNA, 19 bp, Artificial Sequence
  Description of Artificial Sequence: Synthetic oligonucleotide
cttgtcatgaactccggac

SEQ ID NO: 5765 - DNA, 19 bp, Artificial Sequence
  Description of Artificial Sequence: Synthetic oligonucleotide
ccttgtcatgaactccgga

SEQ ID NO: 5766 - DNA, 19 bp, Artificial Sequence
  Description of Artificial Sequence: Synthetic oligonucleotide
accttgtcatgaactccgg

SEQ ID NO: 5767 - DNA, 19 bp, Artificial Sequence
  Description of Artificial Sequence: Synthetic oligonucleotide
gaccttgtcatgaactccg

SEQ ID NO: 5768 - DNA, 19 bp, Artificial Sequence
  Description of Artificial Sequence: Synthetic oligonucleotide
agaccttgtcatgaactcc

SEQ ID NO: 5769 - DNA, 19 bp, Artificial Sequence
  Description of Artificial Sequence: Synthetic oligonucleotide
aagaccttgtcatgaactc

SEQ ID NO: 5770 - DNA, 19 bp, Artificial Sequence
  Description of Artificial Sequence: Synthetic oligonucleotide
taagaccttgtcatgaact

SEQ ID NO: 5771 - DNA, 19 bp, Artificial Sequence
  Description of Artificial Sequence: Synthetic oligonucleotide
gtaagaccttgtcatgaac

SEQ ID NO: 5772 - DNA, 19 bp, Artificial Sequence
  Description of Artificial Sequence: Synthetic oligonucleotide
tgtaagaccttgtcatgaa

SEQ ID NO: 5773 - DNA, 19 bp, Artificial Sequence
  Description of Artificial Sequence: Synthetic oligonucleotide
ctgtaagaccttgtcatga

SEQ ID NO: 5774 - DNA, 19 bp, Artificial Sequence
  Description of Artificial Sequence: Synthetic oligonucleotide
cctgtaagaccttgtcatg

SEQ ID NO: 5775 - DNA, 19 bp, Artificial Sequence
  Description of Artificial Sequence: Synthetic oligonucleotide
acctgtaagaccttgtcat

SEQ ID NO: 5776 - DNA, 19 bp, Artificial Sequence
  Description of Artificial Sequence: Synthetic oligonucleotide
aacctgtaagaccttgtca

SEQ ID NO: 5777 - DNA, 19 bp, Artificial Sequence
  Description of Artificial Sequence: Synthetic oligonucleotide
gaacctgtaagaccttgtc

SEQ ID NO: 5778 - DNA, 19 bp, Artificial Sequence
  Description of Artificial Sequence: Synthetic oligonucleotide
agaacctgtaagaccttgt

SEQ ID NO: 5779 - DNA, 19 bp, Artificial Sequence
  Description of Artificial Sequence: Synthetic oligonucleotide
tagaacctgtaagaccttg

SEQ ID NO: 5780 - DNA, 19 bp, Artificial Sequence
  Description of Artificial Sequence: Synthetic oligonucleotide
gtagaacctgtaagacctt

SEQ ID NO: 5781 - DNA, 19 bp, Artificial Sequence
  Description of Artificial Sequence: Synthetic oligonucleotide
tgtagaacctgtaagacct

SEQ ID NO: 5782 - DNA, 19 bp, Artificial Sequence
  Description of Artificial Sequence: Synthetic oligonucleotide
ttgtagaacctgtaagacc

SEQ ID NO: 5783 - DNA, 19 bp, Artificial Sequence
  Description of Artificial Sequence: Synthetic oligonucleotide
gttgtagaacctgtaagac

SEQ ID NO: 5784 - DNA, 19 bp, Artificial Sequence
  Description of Artificial Sequence: Synthetic oligonucleotide
tgttgtagaacctgtaaga

SEQ ID NO: 5785 - DNA, 19 bp, Artificial Sequence
  Description of Artificial Sequence: Synthetic oligonucleotide
ttgttgtagaacctgtaag

SEQ ID NO: 5786 - DNA, 19 bp, Artificial Sequence
  Description of Artificial Sequence: Synthetic oligonucleotide
attgttgtagaacctgtaa

SEQ ID NO: 5787 - DNA, 19 bp, Artificial Sequence
  Description of Artificial Sequence: Synthetic oligonucleotide
tattgttgtagaacctgta

SEQ ID NO: 5788 - DNA, 19 bp, Artificial Sequence
  Description of Artificial Sequence: Synthetic oligonucleotide
ttattgttgtagaacctgt

SEQ ID NO: 5789 - DNA, 19 bp, Artificial Sequence
  Description of Artificial Sequence: Synthetic oligonucleotide
attattgttgtagaacctg

SEQ ID NO: 5790 - DNA, 19 bp, Artificial Sequence
  Description of Artificial Sequence: Synthetic oligonucleotide
tattattgttgtagaacct

SEQ ID NO: 5791 - DNA, 19 bp, Artificial Sequence
  Description of Artificial Sequence: Synthetic oligonucleotide
gtattattgttgtagaacc

SEQ ID NO: 5792 - DNA, 19 bp, Artificial Sequence
  Description of Artificial Sequence: Synthetic oligonucleotide
ggtattattgttgtagaac

SEQ ID NO: 5793 - DNA, 19 bp, Artificial Sequence
  Description of Artificial Sequence: Synthetic oligonucleotide
aggtattattgttgtagaa

SEQ ID NO: 5794 - DNA, 19 bp, Artificial Sequence
  Description of Artificial Sequence: Synthetic oligonucleotide
aaggtattattgttgtaga

SEQ ID NO: 5795 - DNA, 19 bp, Artificial Sequence
  Description of Artificial Sequence: Synthetic oligonucleotide
gaaggtattattgttgtag

SEQ ID NO: 5796 - DNA, 19 bp, Artificial Sequence
  Description of Artificial Sequence: Synthetic oligonucleotide
tgaaggtattattgttgta

SEQ ID NO: 5797 - DNA, 19 bp, Artificial Sequence
  Description of Artificial Sequence: Synthetic oligonucleotide
ttgaaggtattattgttgt

SEQ ID NO: 5798 - DNA, 19 bp, Artificial Sequence
  Description of Artificial Sequence: Synthetic oligonucleotide
cttgaaggtattattgttg

SEQ ID NO: 5799 - DNA, 19 bp, Artificial Sequence
  Description of Artificial Sequence: Synthetic oligonucleotide
ccttgaaggtattattgtt

SEQ ID NO: 5800 - DNA, 19 bp, Artificial Sequence
  Description of Artificial Sequence: Synthetic oligonucleotide
gccttgaaggtattattgt

SEQ ID NO: 5801 - DNA, 19 bp, Artificial Sequence
  Description of Artificial Sequence: Synthetic oligonucleotide
ggccttgaaggtattattg

SEQ ID NO: 5802 - DNA, 19 bp, Artificial Sequence
  Description of Artificial Sequence: Synthetic oligonucleotide
aggccttgaaggtattatt

SEQ ID NO: 5803 - DNA, 19 bp, Artificial Sequence
  Description of Artificial Sequence: Synthetic oligonucleotide
taggccttgaaggtattat

SEQ ID NO: 5804 - DNA, 19 bp, Artificial Sequence
  Description of Artificial Sequence: Synthetic oligonucleotide
gtaggccttgaaggtatta

SEQ ID NO: 5805 - DNA, 19 bp, Artificial Sequence
  Description of Artificial Sequence: Synthetic oligonucleotide
ggtaggccttgaaggtatt

SEQ ID NO: 5806 - DNA, 19 bp, Artificial Sequence
  Description of Artificial Sequence: Synthetic oligonucleotide
tggtaggccttgaaggtat

SEQ ID NO: 5807 - DNA, 19 bp, Artificial Sequence
  Description of Artificial Sequence: Synthetic oligonucleotide
ctggtaggccttgaaggta

SEQ ID NO: 5808 - DNA, 19 bp, Artificial Sequence
  Description of Artificial Sequence: Synthetic oligonucleotide
actggtaggccttgaaggt

SEQ ID NO: 5809 - DNA, 19 bp, Artificial Sequence
  Description of Artificial Sequence: Synthetic oligonucleotide
aactggtaggccttgaagg

SEQ ID NO: 5810 - DNA, 19 bp, Artificial Sequence
  Description of Artificial Sequence: Synthetic oligonucleotide
aaactggtaggccttgaag

SEQ ID NO: 5811 - DNA, 19 bp, Artificial Sequence
  Description of Artificial Sequence: Synthetic oligonucleotide
aaaactggtaggccttgaa

SEQ ID NO: 5812 - DNA, 19 bp, Artificial Sequence
  Description of Artificial Sequence: Synthetic oligonucleotide
taaaactggtaggccttga

SEQ ID NO: 5813 - DNA, 19 bp, Artificial Sequence
  Description of Artificial Sequence: Synthetic oligonucleotide
gtaaaactggtaggccttg

SEQ ID NO: 5814 - DNA, 19 bp, Artificial Sequence
  Description of Artificial Sequence: Synthetic oligonucleotide
agtaaaactggtaggcctt

SEQ ID NO: 5815 - DNA, 19 bp, Artificial Sequence
  Description of Artificial Sequence: Synthetic oligonucleotide
tagtaaaactggtaggcct

SEQ ID NO: 5816 - DNA, 19 bp, Artificial Sequence
  Description of Artificial Sequence: Synthetic oligonucleotide
atagtaaaactggtaggcc

SEQ ID NO: 5817 - DNA, 19 bp, Artificial Sequence
  Description of Artificial Sequence: Synthetic oligonucleotide
catagtaaaactggtaggc

SEQ ID NO: 5818 - DNA, 19 bp, Artificial Sequence
  Description of Artificial Sequence: Synthetic oligonucleotide
ccatagtaaaactggtagg

SEQ ID NO: 5819 - DNA, 19 bp, Artificial Sequence
  Description of Artificial Sequence: Synthetic oligonucleotide
gccatagtaaaactggtag

SEQ ID NO: 5820 - DNA, 19 bp, Artificial Sequence
  Description of Artificial Sequence: Synthetic oligonucleotide
tgccatagtaaaactggta

SEQ ID NO: 5821 - DNA, 19 bp, Artificial Sequence
  Description of Artificial Sequence: Synthetic oligonucleotide
ctgccatagtaaaactggt

SEQ ID NO: 5822 - DNA, 19 bp, Artificial Sequence
  Description of Artificial Sequence: Synthetic oligonucleotide
gctgccatagtaaaactgg

SEQ ID NO: 5823 - DNA, 19 bp, Artificial Sequence
  Description of Artificial Sequence: Synthetic oligonucleotide
tgctgccatagtaaaactg

SEQ ID NO: 5824 - DNA, 19 bp, Artificial Sequence
  Description of Artificial Sequence: Synthetic oligonucleotide
ttgctgccatagtaaaact

SEQ ID NO: 5825 - DNA, 19 bp, Artificial Sequence
  Description of Artificial Sequence: Synthetic oligonucleotide
gttgctgccatagtaaaac

SEQ ID NO: 5826 - DNA, 19 bp, Artificial Sequence
  Description of Artificial Sequence: Synthetic oligonucleotide
ggttgctgccatagtaaaa

SEQ ID NO: 5827 - DNA, 19 bp, Artificial Sequence
  Description of Artificial Sequence: Synthetic oligonucleotide
cggttgctgccatagtaaa

SEQ ID NO: 5828 - DNA, 19 bp, Artificial Sequence
  Description of Artificial Sequence: Synthetic oligonucleotide
gcggttgctgccatagtaa

SEQ ID NO: 5829 - DNA, 19 bp, Artificial Sequence
  Description of Artificial Sequence: Synthetic oligonucleotide
agcggttgctgccatagta

SEQ ID NO: 5830 - DNA, 19 bp, Artificial Sequence
  Description of Artificial Sequence: Synthetic oligonucleotide
cagcggttgctgccatagt

SEQ ID NO: 5831 - DNA, 19 bp, Artificial Sequence
  Description of Artificial Sequence: Synthetic oligonucleotide
acagcggttgctgccatag

SEQ ID NO: 5832 - DNA, 19 bp, Artificial Sequence
  Description of Artificial Sequence: Synthetic oligonucleotide
tacagcggttgctgccata

SEQ ID NO: 5833 - DNA, 19 bp, Artificial Sequence
  Description of Artificial Sequence: Synthetic oligonucleotide
gtacagcggttgctgccat

SEQ ID NO: 5834 - DNA, 19 bp, Artificial Sequence
  Description of Artificial Sequence: Synthetic oligonucleotide
tgtacagcggttgctgcca

SEQ ID NO: 5835 - DNA, 19 bp, Artificial Sequence
  Description of Artificial Sequence: Synthetic oligonucleotide
ttgtacagcggttgctgcc

SEQ ID NO: 5836 - DNA, 19 bp, Artificial Sequence
  Description of Artificial Sequence: Synthetic oligonucleotide
tttgtacagcggttgctgc

SEQ ID NO: 5837 - DNA, 19 bp, Artificial Sequence
  Description of Artificial Sequence: Synthetic oligonucleotide
gtttgtacagcggttgctg

SEQ ID NO: 5838 - DNA, 19 bp, Artificial Sequence
  Description of Artificial Sequence: Synthetic oligonucleotide
ggtttgtacagcggttgct

SEQ ID NO: 5839 - DNA, 19 bp, Artificial Sequence
  Description of Artificial Sequence: Synthetic oligonucleotide
gggtttgtacagcggttgc

SEQ ID NO: 5840 - DNA, 19 bp, Artificial Sequence
  Description of Artificial Sequence: Synthetic oligonucleotide
ggggtttgtacagcggttg

SEQ ID NO: 5841 - DNA, 19 bp, Artificial Sequence
  Description of Artificial Sequence: Synthetic oligonucleotide
tggggtttgtacagcggtt

SEQ ID NO: 5842 - DNA, 19 bp, Artificial Sequence
  Description of Artificial Sequence: Synthetic oligonucleotide
gtggggtttgtacagcggt

SEQ ID NO: 5843 - DNA, 19 bp, Artificial Sequence
  Description of Artificial Sequence: Synthetic oligonucleotide
ggtggggtttgtacagcgg

SEQ ID NO: 5844 - DNA, 19 bp, Artificial Sequence
  Description of Artificial Sequence: Synthetic oligonucleotide
aggtggggtttgtacagcg

SEQ ID NO: 5845 - DNA, 19 bp, Artificial Sequence
  Description of Artificial Sequence: Synthetic oligonucleotide
taggtggggtttgtacagc

SEQ ID NO: 5846 - DNA, 19 bp, Artificial Sequence
  Description of Artificial Sequence: Synthetic oligonucleotide
gtaggtggggtttgtacag

SEQ ID NO: 5847 - DNA, 19 bp, Artificial Sequence
  Description of Artificial Sequence: Synthetic oligonucleotide
tgtaggtggggtttgtaca

SEQ ID NO: 5848 - DNA, 19 bp, Artificial Sequence
  Description of Artificial Sequence: Synthetic oligonucleotide
gtgtaggtggggtttgtac

SEQ ID NO: 5849 - DNA, 19 bp, Artificial Sequence
  Description of Artificial Sequence: Synthetic oligonucleotide
ggtgtaggtggggtttgta

SEQ ID NO: 5850 - DNA, 19 bp, Artificial Sequence
  Description of Artificial Sequence: Synthetic oligonucleotide
gggtgtaggtggggtttgt

SEQ ID NO: 5851 - DNA, 19 bp, Artificial Sequence
  Description of Artificial Sequence: Synthetic oligonucleotide
agggtgtaggtggggtttg

SEQ ID NO: 5852 - DNA, 19 bp, Artificial Sequence
  Description of Artificial Sequence: Synthetic oligonucleotide
gagggtgtaggtggggttt

SEQ ID NO: 5853 - DNA, 19 bp, Artificial Sequence
  Description of Artificial Sequence: Synthetic oligonucleotide
tgagggtgtaggtggggtt

SEQ ID NO: 5854 - DNA, 19 bp, Artificial Sequence
  Description of Artificial Sequence: Synthetic oligonucleotide
atgagggtgtaggtggggt

SEQ ID NO: 5855 - DNA, 19 bp, Artificial Sequence
  Description of Artificial Sequence: Synthetic oligonucleotide
gatgagggtgtaggtgggg

SEQ ID NO: 5856 - DNA, 19 bp, Artificial Sequence
  Description of Artificial Sequence: Synthetic oligonucleotide
tgatgagggtgtaggtggg

SEQ ID NO: 5857 - DNA, 19 bp, Artificial Sequence
  Description of Artificial Sequence: Synthetic oligonucleotide
atgatgagggtgtaggtgg

SEQ ID NO: 5858 - DNA, 19 bp, Artificial Sequence
  Description of Artificial Sequence: Synthetic oligonucleotide
gatgatgagggtgtaggtg

SEQ ID NO: 5859 - DNA, 19 bp, Artificial Sequence
  Description of Artificial Sequence: Synthetic oligonucleotide
ggatgatgagggtgtaggt

SEQ ID NO: 5860 - DNA, 19 bp, Artificial Sequence
  Description of Artificial Sequence: Synthetic oligonucleotide
cggatgatgagggtgtagg

SEQ ID NO: 5861 - DNA, 19 bp, Artificial Sequence
  Description of Artificial Sequence: Synthetic oligonucleotide
tcggatgatgagggtgtag

SEQ ID NO: 5862 - DNA, 19 bp, Artificial Sequence
  Description of Artificial Sequence: Synthetic oligonucleotide
ctcggatgatgagggtgta

SEQ ID NO: 5863 - DNA, 19 bp, Artificial Sequence
  Description of Artificial Sequence: Synthetic oligonucleotide
cctcggatgatgagggtgt

SEQ ID NO: 5864 - DNA, 19 bp, Artificial Sequence
  Description of Artificial Sequence: Synthetic oligonucleotide
gcctcggatgatgagggtg

SEQ ID NO: 5865 - DNA, 19 bp, Artificial Sequence
  Description of Artificial Sequence: Synthetic oligonucleotide
tgcctcggatgatgagggt

SEQ ID NO: 5866 - DNA, 19 bp, Artificial Sequence
  Description of Artificial Sequence: Synthetic oligonucleotide
ttgcctcggatgatgaggg

SEQ ID NO: 5867 - DNA, 19 bp, Artificial Sequence
  Description of Artificial Sequence: Synthetic oligonucleotide
cttgcctcggatgatgagg

SEQ ID NO: 5868 - DNA, 19 bp, Artificial Sequence
  Description of Artificial Sequence: Synthetic oligonucleotide
tcttgcctcggatgatgag

SEQ ID NO: 5869 - DNA, 19 bp, Artificial Sequence
  Description of Artificial Sequence: Synthetic oligonucleotide
atcttgcctcggatgatga

SEQ ID NO: 5870 - DNA, 19 bp, Artificial Sequence
  Description of Artificial Sequence: Synthetic oligonucleotide
gatcttgcctcggatgatg

SEQ ID NO: 5871 - DNA, 19 bp, Artificial Sequence
  Description of Artificial Sequence: Synthetic oligonucleotide
ggatcttgcctcggatgat

SEQ ID NO: 5872 - DNA, 19 bp, Artificial Sequence
  Description of Artificial Sequence: Synthetic oligonucleotide
cggatcttgcctcggatga

SEQ ID NO: 5873 - DNA, 19 bp, Artificial Sequence
  Description of Artificial Sequence: Synthetic oligonucleotide
ccggatcttgcctcggatg

SEQ ID NO: 5874 - DNA, 19 bp, Artificial Sequence
  Description of Artificial Sequence: Synthetic oligonucleotide
gccggatcttgcctcggat

SEQ ID NO: 5875 - DNA, 19 bp, Artificial Sequence
  Description of Artificial Sequence: Synthetic oligonucleotide
agccggatcttgcctcgga

SEQ ID NO: 5876 - DNA, 19 bp, Artificial Sequence
  Description of Artificial Sequence: Synthetic oligonucleotide
aagccggatcttgcctcgg

SEQ ID NO: 5877 - DNA, 19 bp, Artificial Sequence
  Description of Artificial Sequence: Synthetic oligonucleotide
gaagccggatcttgcctcg

SEQ ID NO: 5878 - DNA, 19 bp, Artificial Sequence
  Description of Artificial Sequence: Synthetic oligonucleotide
cgaagccggatcttgcctc

SEQ ID NO: 5879 - DNA, 19 bp, Artificial Sequence
  Description of Artificial Sequence: Synthetic oligonucleotide
gcgaagccggatcttgcct

SEQ ID NO: 5880 - DNA, 19 bp, Artificial Sequence
  Description of Artificial Sequence: Synthetic oligonucleotide
ggcgaagccggatcttgcc

SEQ ID NO: 5881 - DNA, 19 bp, Artificial Sequence
  Description of Artificial Sequence: Synthetic oligonucleotide
tggcgaagccggatcttgc

SEQ ID NO: 5882 - DNA, 19 bp, Artificial Sequence
  Description of Artificial Sequence: Synthetic oligonucleotide
ctggcgaagccggatcttg

SEQ ID NO: 5883 - DNA, 19 bp, Artificial Sequence
  Description of Artificial Sequence: Synthetic oligonucleotide
cctggcgaagccggatctt

SEQ ID NO: 5884 - DNA, 19 bp, Artificial Sequence
  Description of Artificial Sequence: Synthetic oligonucleotide
gcctggcgaagccggatct

SEQ ID NO: 5885 - DNA, 19 bp, Artificial Sequence
  Description of Artificial Sequence: Synthetic oligonucleotide
cgcctggcgaagccggatc

SEQ ID NO: 5886 - DNA, 19 bp, Artificial Sequence
  Description of Artificial Sequence: Synthetic oligonucleotide
acgcctggcgaagccggat

SEQ ID NO: 5887 - DNA, 19 bp, Artificial Sequence
  Description of Artificial Sequence: Synthetic oligonucleotide
gacgcctggcgaagccgga

SEQ ID NO: 5888 - DNA, 19 bp, Artificial Sequence
  Description of Artificial Sequence: Synthetic oligonucleotide
ggacgcctggcgaagccgg

SEQ ID NO: 5889 - DNA, 19 bp, Artificial Sequence
  Description of Artificial Sequence: Synthetic oligonucleotide
aggacgcctggcgaagccg

SEQ ID NO: 5890 - DNA, 19 bp, Artificial Sequence
  Description of Artificial Sequence: Synthetic oligonucleotide
caggacgcctggcgaagcc

SEQ ID NO: 5891 - DNA, 19 bp, Artificial Sequence
  Description of Artificial Sequence: Synthetic oligonucleotide
ccaggacgcctggcgaagc

SEQ ID NO: 5892 - DNA, 19 bp, Artificial Sequence
  Description of Artificial Sequence: Synthetic oligonucleotide
tccaggacgcctggcgaag

SEQ ID NO: 5893 - DNA, 19 bp, Artificial Sequence
  Description of Artificial Sequence: Synthetic oligonucleotide
atccaggacgcctggcgaa

SEQ ID NO: 5894 - DNA, 19 bp, Artificial Sequence
  Description of Artificial Sequence: Synthetic oligonucleotide
gatccaggacgcctggcga

SEQ ID NO: 5895 - DNA, 19 bp, Artificial Sequence
  Description of Artificial Sequence: Synthetic oligonucleotide
tgatccaggacgcctggcg

SEQ ID NO: 5896 - DNA, 19 bp, Artificial Sequence
  Description of Artificial Sequence: Synthetic oligonucleotide
atgatccaggacgcctggc

SEQ ID NO: 5897 - DNA, 19 bp, Artificial Sequence
  Description of Artificial Sequence: Synthetic oligonucleotide
gatgatccaggacgcctgg

SEQ ID NO: 5898 - DNA, 19 bp, Artificial Sequence
  Description of Artificial Sequence: Synthetic oligonucleotide
ggatgatccaggacgcctg

SEQ ID NO: 5899 - DNA, 19 bp, Artificial Sequence
  Description of Artificial Sequence: Synthetic oligonucleotide
cggatgatccaggacgcct

SEQ ID NO: 5900 - DNA, 19 bp, Artificial Sequence
  Description of Artificial Sequence: Synthetic oligonucleotide
acggatgatccaggacgcc

SEQ ID NO: 5901 - DNA, 19 bp, Artificial Sequence
  Description of Artificial Sequence: Synthetic oligonucleotide
cacggatgatccaggacgc

SEQ ID NO: 5902 - DNA, 19 bp, Artificial Sequence
  Description of Artificial Sequence: Synthetic oligonucleotide
ccacggatgatccaggacg

SEQ ID NO: 5903 - DNA, 19 bp, Artificial Sequence
  Description of Artificial Sequence: Synthetic oligonucleotide
cccacggatgatccaggac

SEQ ID NO: 5904 - DNA, 19 bp, Artificial Sequence
  Description of Artificial Sequence: Synthetic oligonucleotide
ccccacggatgatccagga

SEQ ID NO: 5905 - DNA, 19 bp, Artificial Sequence
  Description of Artificial Sequence: Synthetic oligonucleotide
cccccacggatgatccagg

SEQ ID NO: 5906 - DNA, 19 bp, Artificial Sequence
  Description of Artificial Sequence: Synthetic oligonucleotide
gcccccacggatgatccag

SEQ ID NO: 5907 - DNA, 19 bp, Artificial Sequence
  Description of Artificial Sequence: Synthetic oligonucleotide
tgcccccacggatgatcca

SEQ ID NO: 5908 - DNA, 19 bp, Artificial Sequence
  Description of Artificial Sequence: Synthetic oligonucleotide
gtgcccccacggatgatcc

SEQ ID NO: 5909 - DNA, 19 bp, Artificial Sequence
  Description of Artificial Sequence: Synthetic oligonucleotide
ggtgcccccacggatgatc

SEQ ID NO: 5910 - DNA, 19 bp, Artificial Sequence
  Description of Artificial Sequence: Synthetic oligonucleotide
cggtgcccccacggatgat

SEQ ID NO: 5911 - DNA, 19 bp, Artificial Sequence
  Description of Artificial Sequence: Synthetic oligonucleotide
tcggtgcccccacggatga

SEQ ID NO: 5912 - DNA, 19 bp, Artificial Sequence
  Description of Artificial Sequence: Synthetic oligonucleotide
ttcggtgcccccacggatg

SEQ ID NO: 5913 - DNA, 19 bp, Artificial Sequence
  Description of Artificial Sequence: Synthetic oligonucleotide
cttcggtgcccccacggat

SEQ ID NO: 5914 - DNA, 19 bp, Artificial Sequence
  Description of Artificial Sequence: Synthetic oligonucleotide
gcttcggtgcccccacgga

SEQ ID NO: 5915 - DNA, 19 bp, Artificial Sequence
  Description of Artificial Sequence: Synthetic oligonucleotide
agcttcggtgcccccacgg

SEQ ID NO: 5916 - DNA, 19 bp, Artificial Sequence
  Description of Artificial Sequence: Synthetic oligonucleotide
cagcttcggtgcccccacg

SEQ ID NO: 5917 - DNA, 19 bp, Artificial Sequence
  Description of Artificial Sequence: Synthetic oligonucleotide
tcagcttcggtgcccccac

SEQ ID NO: 5918 - DNA, 19 bp, Artificial Sequence
  Description of Artificial Sequence: Synthetic oligonucleotide
gtcagcttcggtgccccca

SEQ ID NO: 5919 - DNA, 19 bp, Artificial Sequence
  Description of Artificial Sequence: Synthetic oligonucleotide
agtcagcttcggtgccccc

SEQ ID NO: 5920 - DNA, 19 bp, Artificial Sequence
  Description of Artificial Sequence: Synthetic oligonucleotide
tagtcagcttcggtgcccc

SEQ ID NO: 5921 - DNA, 19 bp, Artificial Sequence
  Description of Artificial Sequence: Synthetic oligonucleotide
gtagtcagcttcggtgccc

SEQ ID NO: 5922 - DNA, 19 bp, Artificial Sequence
  Description of Artificial Sequence: Synthetic oligonucleotide
ggtagtcagcttcggtgcc

SEQ ID NO: 5923 - DNA, 19 bp, Artificial Sequence
  Description of Artificial Sequence: Synthetic oligonucleotide
tggtagtcagcttcggtgc

SEQ ID NO: 5924 - DNA, 19 bp, Artificial Sequence
  Description of Artificial Sequence: Synthetic oligonucleotide
ctggtagtcagcttcggtg

SEQ ID NO: 5925 - DNA, 19 bp, Artificial Sequence
  Description of Artificial Sequence: Synthetic oligonucleotide
gctggtagtcagcttcggt

SEQ ID NO: 5926 - DNA, 19 bp, Artificial Sequence
  Description of Artificial Sequence: Synthetic oligonucleotide
agctggtagtcagcttcgg

SEQ ID NO: 5927 - DNA, 19 bp, Artificial Sequence
  Description of Artificial Sequence: Synthetic oligonucleotide
aagctggtagtcagcttcg

SEQ ID NO: 5928 - DNA, 19 bp, Artificial Sequence
  Description of Artificial Sequence: Synthetic oligonucleotide
gaagctggtagtcagcttc

SEQ ID NO: 5929 - DNA, 19 bp, Artificial Sequence
  Description of Artificial Sequence: Synthetic oligonucleotide
tgaagctggtagtcagctt

SEQ ID NO: 5930 - DNA, 19 bp, Artificial Sequence
  Description of Artificial Sequence: Synthetic oligonucleotide
gtgaagctggtagtcagct

SEQ ID NO: 5931 - DNA, 19 bp, Artificial Sequence
  Description of Artificial Sequence: Synthetic oligonucleotide
cgtgaagctggtagtcagc

SEQ ID NO: 5932 - DNA, 19 bp, Artificial Sequence
  Description of Artificial Sequence: Synthetic oligonucleotide
ccgtgaagctggtagtcag

SEQ ID NO: 5933 - DNA, 19 bp, Artificial Sequence
  Description of Artificial Sequence: Synthetic oligonucleotide
gccgtgaagctggtagtca

SEQ ID NO: 5934 - DNA, 19 bp, Artificial Sequence
  Description of Artificial Sequence: Synthetic oligonucleotide
cgccgtgaagctggtagtc

SEQ ID NO: 5935 - DNA, 19 bp, Artificial Sequence
  Description of Artificial Sequence: Synthetic oligonucleotide
acgccgtgaagctggtagt

SEQ ID NO: 5936 - DNA, 19 bp, Artificial Sequence
  Description of Artificial Sequence: Synthetic oligonucleotide
gacgccgtgaagctggtag

SEQ ID NO: 5937 - DNA, 19 bp, Artificial Sequence
  Description of Artificial Sequence: Synthetic oligonucleotide
ggacgccgtgaagctggta

SEQ ID NO: 5938 - DNA, 19 bp, Artificial Sequence
  Description of Artificial Sequence: Synthetic oligonucleotide
tggacgccgtgaagctggt

SEQ ID NO: 5939 - DNA, 19 bp, Artificial Sequence
  Description of Artificial Sequence: Synthetic oligonucleotide
ttggacgccgtgaagctgg

SEQ ID NO: 5940 - DNA, 19 bp, Artificial Sequence
  Description of Artificial Sequence: Synthetic oligonucleotide
cttggacgccgtgaagctg

SEQ ID NO: 5941 - DNA, 19 bp, Artificial Sequence
  Description of Artificial Sequence: Synthetic oligonucleotide
acttggacgccgtgaagct

SEQ ID NO: 5942 - DNA, 19 bp, Artificial Sequence
  Description of Artificial Sequence: Synthetic oligonucleotide
gacttggacgccgtgaagc

SEQ ID NO: 5943 - DNA, 19 bp, Artificial Sequence
  Description of Artificial Sequence: Synthetic oligonucleotide
tgacttggacgccgtgaag

SEQ ID NO: 5944 - DNA, 19 bp, Artificial Sequence
  Description of Artificial Sequence: Synthetic oligonucleotide
atgacttggacgccgtgaa

SEQ ID NO: 5945 - DNA, 19 bp, Artificial Sequence
  Description of Artificial Sequence: Synthetic oligonucleotide
gatgacttggacgccgtga

SEQ ID NO: 5946 - DNA, 19 bp, Artificial Sequence
  Description of Artificial Sequence: Synthetic oligonucleotide
agatgacttggacgccgtg

SEQ ID NO: 5947 - DNA, 19 bp, Artificial Sequence
  Description of Artificial Sequence: Synthetic oligonucleotide
cagatgacttggacgccgt

SEQ ID NO: 5948 - DNA, 19 bp, Artificial Sequence
  Description of Artificial Sequence: Synthetic oligonucleotide
gcagatgacttggacgccg

SEQ ID NO: 5949 - DNA, 19 bp, Artificial Sequence
  Description of Artificial Sequence: Synthetic oligonucleotide
ggcagatgacttggacgcc

SEQ ID NO: 5950 - DNA, 19 bp, Artificial Sequence
  Description of Artificial Sequence: Synthetic oligonucleotide
tggcagatgacttggacgc

SEQ ID NO: 5951 - DNA, 19 bp, Artificial Sequence
  Description of Artificial Sequence: Synthetic oligonucleotide
gtggcagatgacttggacg

SEQ ID NO: 5952 - DNA, 19 bp, Artificial Sequence
  Description of Artificial Sequence: Synthetic oligonucleotide
tgtggcagatgacttggac

SEQ ID NO: 5953 - DNA, 19 bp, Artificial Sequence
  Description of Artificial Sequence: Synthetic oligonucleotide
gtgtggcagatgacttgga

SEQ ID NO: 5954 - DNA, 19 bp, Artificial Sequence
  Description of Artificial Sequence: Synthetic oligonucleotide
tgtgtggcagatgacttgg

SEQ ID NO: 5955 - DNA, 19 bp, Artificial Sequence
  Description of Artificial Sequence: Synthetic oligonucleotide
ctgtgtggcagatgacttg

SEQ ID NO: 5956 - DNA, 19 bp, Artificial Sequence
  Description of Artificial Sequence: Synthetic oligonucleotide
tctgtgtggcagatgactt

SEQ ID NO: 5957 - DNA, 19 bp, Artificial Sequence
  Description of Artificial Sequence: Synthetic oligonucleotide
ctctgtgtggcagatgact

SEQ ID NO: 5958 - DNA, 19 bp, Artificial Sequence
  Description of Artificial Sequence: Synthetic oligonucleotide
cctctgtgtggcagatgac

SEQ ID NO: 5959 - DNA, 19 bp, Artificial Sequence
  Description of Artificial Sequence: Synthetic oligonucleotide
gcctctgtgtggcagatga

SEQ ID NO: 5960 - DNA, 19 bp, Artificial Sequence
  Description of Artificial Sequence: Synthetic oligonucleotide
tgcctctgtgtggcagatg

SEQ ID NO: 5961 - DNA, 19 bp, Artificial Sequence
  Description of Artificial Sequence: Synthetic oligonucleotide
ctgcctctgtgtggcagat

SEQ ID NO: 5962 - DNA, 19 bp, Artificial Sequence
  Description of Artificial Sequence: Synthetic oligonucleotide
actgcctctgtgtggcaga

SEQ ID NO: 5963 - DNA, 19 bp, Artificial Sequence
  Description of Artificial Sequence: Synthetic oligonucleotide
gactgcctctgtgtggcag

SEQ ID NO: 5964 - DNA, 19 bp, Artificial Sequence
  Description of Artificial Sequence: Synthetic oligonucleotide
cgactgcctctgtgtggca

SEQ ID NO: 5965 - DNA, 19 bp, Artificial Sequence
  Description of Artificial Sequence: Synthetic oligonucleotide
gcgactgcctctgtgtggc

SEQ ID NO: 5966 - DNA, 19 bp, Artificial Sequence
  Description of Artificial Sequence: Synthetic oligonucleotide
agcgactgcctctgtgtgg

SEQ ID NO: 5967 - DNA, 19 bp, Artificial Sequence
  Description of Artificial Sequence: Synthetic oligonucleotide
cagcgactgcctctgtgtg

SEQ ID NO: 5968 - DNA, 19 bp, Artificial Sequence
  Description of Artificial Sequence: Synthetic oligonucleotide
tcagcgactgcctctgtgt

SEQ ID NO: 5969 - DNA, 19 bp, Artificial Sequence
  Description of Artificial Sequence: Synthetic oligonucleotide
ttcagcgactgcctctgtg

SEQ ID NO: 5970 - DNA, 19 bp, Artificial Sequence
  Description of Artificial Sequence: Synthetic oligonucleotide
gttcagcgactgcctctgt

SEQ ID NO: 5971 - DNA, 19 bp, Artificial Sequence
  Description of Artificial Sequence: Synthetic oligonucleotide
tgttcagcgactgcctctg

SEQ ID NO: 5972 - DNA, 19 bp, Artificial Sequence
  Description of Artificial Sequence: Synthetic oligonucleotide
ctgttcagcgactgcctct

SEQ ID NO: 5973 - DNA, 19 bp, Artificial Sequence
  Description of Artificial Sequence: Synthetic oligonucleotide
gctgttcagcgactgcctc

SEQ ID NO: 5974 - DNA, 19 bp, Artificial Sequence
  Description of Artificial Sequence: Synthetic oligonucleotide
agctgttcagcgactgcct

SEQ ID NO: 5975 - DNA, 19 bp, Artificial Sequence
  Description of Artificial Sequence: Synthetic oligonucleotide
gagctgttcagcgactgcc

SEQ ID NO: 5976 - DNA, 19 bp, Artificial Sequence
  Description of Artificial Sequence: Synthetic oligonucleotide
tgagctgttcagcgactgc

SEQ ID NO: 5977 - DNA, 19 bp, Artificial Sequence
  Description of Artificial Sequence: Synthetic oligonucleotide
ctgagctgttcagcgactg

SEQ ID NO: 5978 - DNA, 19 bp, Artificial Sequence
  Description of Artificial Sequence: Synthetic oligonucleotide
gctgagctgttcagcgact

SEQ ID NO: 5979 - DNA, 19 bp, Artificial Sequence
  Description of Artificial Sequence: Synthetic oligonucleotide
ggctgagctgttcagcgac

SEQ ID NO: 5980 - DNA, 19 bp, Artificial Sequence
  Description of Artificial Sequence: Synthetic oligonucleotide
cggctgagctgttcagcga

SEQ ID NO: 5981 - DNA, 19 bp, Artificial Sequence
  Description of Artificial Sequence: Synthetic oligonucleotide
tcggctgagctgttcagcg

SEQ ID NO: 5982 - DNA, 19 bp, Artificial Sequence
  Description of Artificial Sequence: Synthetic oligonucleotide
gtcggctgagctgttcagc

SEQ ID NO: 5983 - DNA, 19 bp, Artificial Sequence
  Description of Artificial Sequence: Synthetic oligonucleotide
agtcggctgagctgttcag

SEQ ID NO: 5984 - DNA, 19 bp, Artificial Sequence
  Description of Artificial Sequence: Synthetic oligonucleotide
cagtcggctgagctgttca

SEQ ID NO: 5985 - DNA, 19 bp, Artificial Sequence
  Description of Artificial Sequence: Synthetic oligonucleotide
ccagtcggctgagctgttc

SEQ ID NO: 5986 - DNA, 19 bp, Artificial Sequence
  Description of Artificial Sequence: Synthetic oligonucleotide
accagtcggctgagctgtt

SEQ ID NO: 5987 - DNA, 19 bp, Artificial Sequence
  Description of Artificial Sequence: Synthetic oligonucleotide
caccagtcggctgagctgt

SEQ ID NO: 5988 - DNA, 19 bp, Artificial Sequence
  Description of Artificial Sequence: Synthetic oligonucleotide
tcaccagtcggctgagctg

SEQ ID NO: 5989 - DNA, 19 bp, Artificial Sequence
  Description of Artificial Sequence: Synthetic oligonucleotide
ttcaccagtcggctgagct

SEQ ID NO: 5990 - DNA, 19 bp, Artificial Sequence
  Description of Artificial Sequence: Synthetic oligonucleotide
gttcaccagtcggctgagc

SEQ ID NO: 5991 - DNA, 19 bp, Artificial Sequence
  Description of Artificial Sequence: Synthetic oligonucleotide
ggttcaccagtcggctgag

SEQ ID NO: 5992 - DNA, 19 bp, Artificial Sequence
  Description of Artificial Sequence: Synthetic oligonucleotide
cggttcaccagtcggctga

SEQ ID NO: 5993 - DNA, 19 bp, Artificial Sequence
  Description of Artificial Sequence: Synthetic oligonucleotide
tcggttcaccagtcggctg

SEQ ID NO: 5994 - DNA, 19 bp, Artificial Sequence
  Description of Artificial Sequence: Synthetic oligonucleotide
ttcggttcaccagtcggct

SEQ ID NO: 5995 - DNA, 19 bp, Artificial Sequence
  Description of Artificial Sequence: Synthetic oligonucleotide
gttcggttcaccagtcggc

SEQ ID NO: 5996 - DNA, 19 bp, Artificial Sequence
  Description of Artificial Sequence: Synthetic oligonucleotide
agttcggttcaccagtcgg

SEQ ID NO: 5997 - DNA, 19 bp, Artificial Sequence
  Description of Artificial Sequence: Synthetic oligonucleotide
aagttcggttcaccagtcg

SEQ ID NO: 5998 - DNA, 19 bp, Artificial Sequence
  Description of Artificial Sequence: Synthetic oligonucleotide
caagttcggttcaccagtc

SEQ ID NO: 5999 - DNA, 19 bp, Artificial Sequence
  Description of Artificial Sequence: Synthetic oligonucleotide
gcaagttcggttcaccagt

SEQ ID NO: 6000 - DNA, 19 bp, Artificial Sequence
  Description of Artificial Sequence: Synthetic oligonucleotide
ggcaagttcggttcaccag

SEQ ID NO: 6001 - DNA, 19 bp, Artificial Sequence
  Description of Artificial Sequence: Synthetic oligonucleotide
gggcaagttcggttcacca

SEQ ID NO: 6002 - DNA, 19 bp, Artificial Sequence
  Description of Artificial Sequence: Synthetic oligonucleotide
tgggcaagttcggttcacc

SEQ ID NO: 6003 - DNA, 19 bp, Artificial Sequence
  Description of Artificial Sequence: Synthetic oligonucleotide
ctgggcaagttcggttcac

SEQ ID NO: 6004 - DNA, 19 bp, Artificial Sequence
  Description of Artificial Sequence: Synthetic oligonucleotide
cctgggcaagttcggttca

SEQ ID NO: 6005 - DNA, 19 bp, Artificial Sequence
  Description of Artificial Sequence: Synthetic oligonucleotide
gcctgggcaagttcggttc

SEQ ID NO: 6006 - DNA, 19 bp, Artificial Sequence
  Description of Artificial Sequence: Synthetic oligonucleotide
agcctgggcaagttcggtt

SEQ ID NO: 6007 - DNA, 19 bp, Artificial Sequence
  Description of Artificial Sequence: Synthetic oligonucleotide
aagcctgggcaagttcggt

SEQ ID NO: 6008 - DNA, 19 bp, Artificial Sequence
  Description of Artificial Sequence: Synthetic oligonucleotide
gaagcctgggcaagttcgg

SEQ ID NO: 6009 - DNA, 19 bp, Artificial Sequence
  Description of Artificial Sequence: Synthetic oligonucleotide
ggaagcctgggcaagttcg

SEQ ID NO: 6010 - DNA, 19 bp, Artificial Sequence
  Description of Artificial Sequence: Synthetic oligonucleotide
aggaagcctgggcaagttc

SEQ ID NO: 6011 - DNA, 19 bp, Artificial Sequence
  Description of Artificial Sequence: Synthetic oligonucleotide
caggaagcctgggcaagtt

SEQ ID NO: 6012 - DNA, 19 bp, Artificial Sequence
  Description of Artificial Sequence: Synthetic oligonucleotide
ccaggaagcctgggcaagt

SEQ ID NO: 6013 - DNA, 19 bp, Artificial Sequence
  Description of Artificial Sequence: Synthetic oligonucleotide
gccaggaagcctgggcaag

SEQ ID NO: 6014 - DNA, 19 bp, Artificial Sequence
  Description of Artificial Sequence: Synthetic oligonucleotide
agccaggaagcctgggcaa

SEQ ID NO: 6015 - DNA, 19 bp, Artificial Sequence
  Description of Artificial Sequence: Synthetic oligonucleotide
gagccaggaagcctgggca

SEQ ID NO: 6016 - DNA, 19 bp, Artificial Sequence
  Description of Artificial Sequence: Synthetic oligonucleotide
ggagccaggaagcctgggc

SEQ ID NO: 6017 - DNA, 19 bp, Artificial Sequence
  Description of Artificial Sequence: Synthetic oligonucleotide
aggagccaggaagcctggg

SEQ ID NO: 6018 - DNA, 19 bp, Artificial Sequence
  Description of Artificial Sequence: Synthetic oligonucleotide
caggagccaggaagcctgg

SEQ ID NO: 6019 - DNA, 19 bp, Artificial Sequence
  Description of Artificial Sequence: Synthetic oligonucleotide
ccaggagccaggaagcctg

SEQ ID NO: 6020 - DNA, 19 bp, Artificial Sequence
  Description of Artificial Sequence: Synthetic oligonucleotide
accaggagccaggaagcct

SEQ ID NO: 6021 - DNA, 19 bp, Artificial Sequence
  Description of Artificial Sequence: Synthetic oligonucleotide
caccaggagccaggaagcc

SEQ ID NO: 6022 - DNA, 19 bp, Artificial Sequence
  Description of Artificial Sequence: Synthetic oligonucleotide
ccaccaggagccaggaagc

SEQ ID NO: 6023 - DNA, 19 bp, Artificial Sequence
  Description of Artificial Sequence: Synthetic oligonucleotide
accaccaggagccaggaag

SEQ ID NO: 6024 - DNA, 19 bp, Artificial Sequence
  Description of Artificial Sequence: Synthetic oligonucleotide
gaccaccaggagccaggaa

SEQ ID NO: 6025 - DNA, 19 bp, Artificial Sequence
  Description of Artificial Sequence: Synthetic oligonucleotide
ggaccaccaggagccagga

SEQ ID NO: 6026 - DNA, 19 bp, Artificial Sequence
  Description of Artificial Sequence: Synthetic oligonucleotide
gggaccaccaggagccagg

SEQ ID NO: 6027 - DNA, 19 bp, Artificial Sequence
  Description of Artificial Sequence: Synthetic oligonucleotide
agggaccaccaggagccag

SEQ ID NO: 6028 - DNA, 19 bp, Artificial Sequence
  Description of Artificial Sequence: Synthetic oligonucleotide
cagggaccaccaggagcca

SEQ ID NO: 6029 - DNA, 19 bp, Artificial Sequence
  Description of Artificial Sequence: Synthetic oligonucleotide
ccagggaccaccaggagcc

SEQ ID NO: 6030 - DNA, 19 bp, Artificial Sequence
  Description of Artificial Sequence: Synthetic oligonucleotide
cccagggaccaccaggagc

SEQ ID NO: 6031 - DNA, 19 bp, Artificial Sequence
  Description of Artificial Sequence: Synthetic oligonucleotide
acccagggaccaccaggag

SEQ ID NO: 6032 - DNA, 19 bp, Artificial Sequence
  Description of Artificial Sequence: Synthetic oligonucleotide
tacccagggaccaccagga

SEQ ID NO: 6033 - DNA, 19 bp, Artificial Sequence
  Description of Artificial Sequence: Synthetic oligonucleotide
gtacccagggaccaccagg

SEQ ID NO: 6034 - DNA, 19 bp, Artificial Sequence
  Description of Artificial Sequence: Synthetic oligonucleotide
tgtacccagggaccaccag

SEQ ID NO: 6035 - DNA, 19 bp, Artificial Sequence
  Description of Artificial Sequence: Synthetic oligonucleotide
ctgtacccagggaccacca

SEQ ID NO: 6036 - DNA, 19 bp, Artificial Sequence
  Description of Artificial Sequence: Synthetic oligonucleotide
cctgtacccagggaccacc

SEQ ID NO: 6037 - DNA, 19 bp, Artificial Sequence
  Description of Artificial Sequence: Synthetic oligonucleotide
tcctgtacccagggaccac

SEQ ID NO: 6038 - DNA, 19 bp, Artificial Sequence
  Description of Artificial Sequence: Synthetic oligonucleotide
gtcctgtacccagggacca

SEQ ID NO: 6039 - DNA, 19 bp, Artificial Sequence
  Description of Artificial Sequence: Synthetic oligonucleotide
cgtcctgtacccagggacc

SEQ ID NO: 6040 - DNA, 19 bp, Artificial Sequence
  Description of Artificial Sequence: Synthetic oligonucleotide
acgtcctgtacccagggac

SEQ ID NO: 6041 - DNA, 19 bp, Artificial Sequence
  Description of Artificial Sequence: Synthetic oligonucleotide
tacgtcctgtacccaggga

SEQ ID NO: 6042 - DNA, 19 bp, Artificial Sequence
  Description of Artificial Sequence: Synthetic oligonucleotide
ctacgtcctgtacccaggg

SEQ ID NO: 6043 - DNA, 19 bp, Artificial Sequence
  Description of Artificial Sequence: Synthetic oligonucleotide
gctacgtcctgtacccagg

SEQ ID NO: 6044 - DNA, 19 bp, Artificial Sequence
  Description of Artificial Sequence: Synthetic oligonucleotide
ggctacgtcctgtacccag

SEQ ID NO: 6045 - DNA, 19 bp, Artificial Sequence
  Description of Artificial Sequence: Synthetic oligonucleotide
aggctacgtcctgtaccca

SEQ ID NO: 6046 - DNA, 19 bp, Artificial Sequence
  Description of Artificial Sequence: Synthetic oligonucleotide
taggctacgtcctgtaccc

SEQ ID NO: 6047 - DNA, 19 bp, Artificial Sequence
  Description of Artificial Sequence: Synthetic oligonucleotide
ataggctacgtcctgtacc

SEQ ID NO: 6048 - DNA, 19 bp, Artificial Sequence
  Description of Artificial Sequence: Synthetic oligonucleotide
cataggctacgtcctgtac

SEQ ID NO: 6049 - DNA, 19 bp, Artificial Sequence
  Description of Artificial Sequence: Synthetic oligonucleotide
tcataggctacgtcctgta

SEQ ID NO: 6050 - DNA, 19 bp, Artificial Sequence
  Description of Artificial Sequence: Synthetic oligonucleotide
gtcataggctacgtcctgt

SEQ ID NO: 6051 - DNA, 19 bp, Artificial Sequence
  Description of Artificial Sequence: Synthetic oligonucleotide
ggtcataggctacgtcctg

SEQ ID NO: 6052 - DNA, 19 bp, Artificial Sequence
  Description of Artificial Sequence: Synthetic oligonucleotide
aggtcataggctacgtcct

SEQ ID NO: 6053 - DNA, 19 bp, Artificial Sequence
  Description of Artificial Sequence: Synthetic oligonucleotide
caggtcataggctacgtcc

SEQ ID NO: 6054 - DNA, 19 bp, Artificial Sequence
  Description of Artificial Sequence: Synthetic oligonucleotide
acaggtcataggctacgtc

SEQ ID NO: 6055 - DNA, 19 bp, Artificial Sequence
  Description of Artificial Sequence: Synthetic oligonucleotide
cacaggtcataggctacgt

SEQ ID NO: 6056 - DNA, 19 bp, Artificial Sequence
  Description of Artificial Sequence: Synthetic oligonucleotide
ccacaggtcataggctacg

SEQ ID NO: 6057 - DNA, 19 bp, Artificial Sequence
  Description of Artificial Sequence: Synthetic oligonucleotide
gccacaggtcataggctac

SEQ ID NO: 6058 - DNA, 19 bp, Artificial Sequence
  Description of Artificial Sequence: Synthetic oligonucleotide
tgccacaggtcataggcta

SEQ ID NO: 6059 - DNA, 19 bp, Artificial Sequence
  Description of Artificial Sequence: Synthetic oligonucleotide
ctgccacaggtcataggct

SEQ ID NO: 6060 - DNA, 19 bp, Artificial Sequence
  Description of Artificial Sequence: Synthetic oligonucleotide
cctgccacaggtcataggc

SEQ ID NO: 6061 - DNA, 19 bp, Artificial Sequence
  Description of Artificial Sequence: Synthetic oligonucleotide
tcctgccacaggtcatagg

SEQ ID NO: 6062 - DNA, 19 bp, Artificial Sequence
  Description of Artificial Sequence: Synthetic oligonucleotide
ctcctgccacaggtcatag

SEQ ID NO: 6063 - DNA, 19 bp, Artificial Sequence
  Description of Artificial Sequence: Synthetic oligonucleotide
cctcctgccacaggtcata

SEQ ID NO: 6064 - DNA, 19 bp, Artificial Sequence
  Description of Artificial Sequence: Synthetic oligonucleotide
tcctcctgccacaggtcat

SEQ ID NO: 6065 - DNA, 19 bp, Artificial Sequence
  Description of Artificial Sequence: Synthetic oligonucleotide
ctcctcctgccacaggtca

SEQ ID NO: 6066 - DNA, 19 bp, Artificial Sequence
  Description of Artificial Sequence: Synthetic oligonucleotide
tctcctcctgccacaggtc

SEQ ID NO: 6067 - DNA, 19 bp, Artificial Sequence
  Description of Artificial Sequence: Synthetic oligonucleotide
ctctcctcctgccacaggt

SEQ ID NO: 6068 - DNA, 19 bp, Artificial Sequence
  Description of Artificial Sequence: Synthetic oligonucleotide
actctcctcctgccacagg

SEQ ID NO: 6069 - DNA, 19 bp, Artificial Sequence
  Description of Artificial Sequence: Synthetic oligonucleotide
tactctcctcctgccacag

SEQ ID NO: 6070 - DNA, 19 bp, Artificial Sequence
  Description of Artificial Sequence: Synthetic oligonucleotide
ttactctcctcctgccaca

SEQ ID NO: 6071 - DNA, 19 bp, Artificial Sequence
  Description of Artificial Sequence: Synthetic oligonucleotide
gttactctcctcctgccac

SEQ ID NO: 6072 - DNA, 19 bp, Artificial Sequence
  Description of Artificial Sequence: Synthetic oligonucleotide
ggttactctcctcctgcca

SEQ ID NO: 6073 - DNA, 19 bp, Artificial Sequence
  Description of Artificial Sequence: Synthetic oligonucleotide
tggttactctcctcctgcc

SEQ ID NO: 6074 - DNA, 19 bp, Artificial Sequence
  Description of Artificial Sequence: Synthetic oligonucleotide
gtggttactctcctcctgc

SEQ ID NO: 6075 - DNA, 19 bp, Artificial Sequence
  Description of Artificial Sequence: Synthetic oligonucleotide
cgtggttactctcctcctg

SEQ ID NO: 6076 - DNA, 19 bp, Artificial Sequence
  Description of Artificial Sequence: Synthetic oligonucleotide
tcgtggttactctcctcct

SEQ ID NO: 6077 - DNA, 19 bp, Artificial Sequence
  Description of Artificial Sequence: Synthetic oligonucleotide
ctcgtggttactctcctcc

SEQ ID NO: 6078 - DNA, 19 bp, Artificial Sequence
  Description of Artificial Sequence: Synthetic oligonucleotide
actcgtggttactctcctc

SEQ ID NO: 6079 - DNA, 19 bp, Artificial Sequence
  Description of Artificial Sequence: Synthetic oligonucleotide
cactcgtggttactctcct

SEQ ID NO: 6080 - DNA, 19 bp, Artificial Sequence
  Description of Artificial Sequence: Synthetic oligonucleotide
gcactcgtggttactctcc

SEQ ID NO: 6081 - DNA, 19 bp, Artificial Sequence
  Description of Artificial Sequence: Synthetic oligonucleotide
tgcactcgtggttactctc

SEQ ID NO: 6082 - DNA, 19 bp, Artificial Sequence
  Description of Artificial Sequence: Synthetic oligonucleotide
gtgcactcgtggttactct

SEQ ID NO: 6083 - DNA, 19 bp, Artificial Sequence
  Description of Artificial Sequence: Synthetic oligonucleotide
ggtgcactcgtggttactc

SEQ ID NO: 6084 - DNA, 19 bp, Artificial Sequence
  Description of Artificial Sequence: Synthetic oligonucleotide
tggtgcactcgtggttact

SEQ ID NO: 6085 - DNA, 19 bp, Artificial Sequence
  Description of Artificial Sequence: Synthetic oligonucleotide
ttggtgcactcgtggttac

SEQ ID NO: 6086 - DNA, 19 bp, Artificial Sequence
  Description of Artificial Sequence: Synthetic oligonucleotide
cttggtgcactcgtggtta

SEQ ID NO: 6087 - DNA, 19 bp, Artificial Sequence
  Description of Artificial Sequence: Synthetic oligonucleotide
ccttggtgcactcgtggtt

SEQ ID NO: 6088 - DNA, 19 bp, Artificial Sequence
  Description of Artificial Sequence: Synthetic oligonucleotide
gccttggtgcactcgtggt

SEQ ID NO: 6089 - DNA, 19 bp, Artificial Sequence
  Description of Artificial Sequence: Synthetic oligonucleotide
agccttggtgcactcgtgg

SEQ ID NO: 6090 - DNA, 19 bp, Artificial Sequence
  Description of Artificial Sequence: Synthetic oligonucleotide
cagccttggtgcactcgtg

SEQ ID NO: 6091 - DNA, 19 bp, Artificial Sequence
  Description of Artificial Sequence: Synthetic oligonucleotide
acagccttggtgcactcgt

SEQ ID NO: 6092 - DNA, 19 bp, Artificial Sequence
  Description of Artificial Sequence: Synthetic oligonucleotide
cacagccttggtgcactcg

SEQ ID NO: 6093 - DNA, 19 bp, Artificial Sequence
  Description of Artificial Sequence: Synthetic oligonucleotide
tcacagccttggtgcactc

SEQ ID NO: 6094 - DNA, 19 bp, Artificial Sequence
  Description of Artificial Sequence: Synthetic oligonucleotide
ttcacagccttggtgcact

SEQ ID NO: 6095 - DNA, 19 bp, Artificial Sequence
  Description of Artificial Sequence: Synthetic oligonucleotide
gttcacagccttggtgcac

SEQ ID NO: 6096 - DNA, 19 bp, Artificial Sequence
  Description of Artificial Sequence: Synthetic oligonucleotide
agttcacagccttggtgca

SEQ ID NO: 6097 - DNA, 19 bp, Artificial Sequence
  Description of Artificial Sequence: Synthetic oligonucleotide
aagttcacagccttggtgc

SEQ ID NO: 6098 - DNA, 19 bp, Artificial Sequence
  Description of Artificial Sequence: Synthetic oligonucleotide
aaagttcacagccttggtg

SEQ ID NO: 6099 - DNA, 19 bp, Artificial Sequence
  Description of Artificial Sequence: Synthetic oligonucleotide
caaagttcacagccttggt

SEQ ID NO: 6100 - DNA, 19 bp, Artificial Sequence
  Description of Artificial Sequence: Synthetic oligonucleotide
gcaaagttcacagccttgg

SEQ ID NO: 6101 - DNA, 19 bp, Artificial Sequence
  Description of Artificial Sequence: Synthetic oligonucleotide
ggcaaagttcacagccttg

SEQ ID NO: 6102 - DNA, 19 bp, Artificial Sequence
  Description of Artificial Sequence: Synthetic oligonucleotide
tggcaaagttcacagcctt

SEQ ID NO: 6103 - DNA, 19 bp, Artificial Sequence
  Description of Artificial Sequence: Synthetic oligonucleotide
atggcaaagttcacagcct

SEQ ID NO: 6104 - DNA, 19 bp, Artificial Sequence
  Description of Artificial Sequence: Synthetic oligonucleotide
catggcaaagttcacagcc

SEQ ID NO: 6105 - DNA, 19 bp, Artificial Sequence
  Description of Artificial Sequence: Synthetic oligonucleotide
gcatggcaaagttcacagc

SEQ ID NO: 6106 - DNA, 19 bp, Artificial Sequence
  Description of Artificial Sequence: Synthetic oligonucleotide
tgcatggcaaagttcacag

SEQ ID NO: 6107 - DNA, 19 bp, Artificial Sequence
  Description of Artificial Sequence: Synthetic oligonucleotide
gtgcatggcaaagttcaca

SEQ ID NO: 6108 - DNA, 19 bp, Artificial Sequence
  Description of Artificial Sequence: Synthetic oligonucleotide
cgtgcatggcaaagttcac

SEQ ID NO: 6109 - DNA, 19 bp, Artificial Sequence
  Description of Artificial Sequence: Synthetic oligonucleotide
tcgtgcatggcaaagttca

SEQ ID NO: 6110 - DNA, 19 bp, Artificial Sequence
  Description of Artificial Sequence: Synthetic oligonucleotide
ctcgtgcatggcaaagttc

SEQ ID NO: 6111 - DNA, 19 bp, Artificial Sequence
  Description of Artificial Sequence: Synthetic oligonucleotide
gctcgtgcatggcaaagtt

SEQ ID NO: 6112 - DNA, 19 bp, Artificial Sequence
  Description of Artificial Sequence: Synthetic oligonucleotide
agctcgtgcatggcaaagt

SEQ ID NO: 6113 - DNA, 19 bp, Artificial Sequence
  Description of Artificial Sequence: Synthetic oligonucleotide
cagctcgtgcatggcaaag

SEQ ID NO: 6114 - DNA, 19 bp, Artificial Sequence
  Description of Artificial Sequence: Synthetic oligonucleotide
gcagctcgtgcatggcaaa

SEQ ID NO: 6115 - DNA, 19 bp, Artificial Sequence
  Description of Artificial Sequence: Synthetic oligonucleotide
tgcagctcgtgcatggcaa

SEQ ID NO: 6116 - DNA, 19 bp, Artificial Sequence
  Description of Artificial Sequence: Synthetic oligonucleotide
ctgcagctcgtgcatggca

SEQ ID NO: 6117 - DNA, 19 bp, Artificial Sequence
  Description of Artificial Sequence: Synthetic oligonucleotide
gctgcagctcgtgcatggc

SEQ ID NO: 6118 - DNA, 19 bp, Artificial Sequence
  Description of Artificial Sequence: Synthetic oligonucleotide
agctgcagctcgtgcatgg

SEQ ID NO: 6119 - DNA, 19 bp, Artificial Sequence
  Description of Artificial Sequence: Synthetic oligonucleotide
gagctgcagctcgtgcatg

SEQ ID NO: 6120 - DNA, 19 bp, Artificial Sequence
  Description of Artificial Sequence: Synthetic oligonucleotide
tgagctgcagctcgtgcat

SEQ ID NO: 6121 - DNA, 19 bp, Artificial Sequence
  Description of Artificial Sequence: Synthetic oligonucleotide
atgagctgcagctcgtgca

SEQ ID NO: 6122 - DNA, 19 bp, Artificial Sequence
  Description of Artificial Sequence: Synthetic oligonucleotide
gatgagctgcagctcgtgc

SEQ ID NO: 6123 - DNA, 19 bp, Artificial Sequence
  Description of Artificial Sequence: Synthetic oligonucleotide
ggatgagctgcagctcgtg

SEQ ID NO: 6124 - DNA, 19 bp, Artificial Sequence
  Description of Artificial Sequence: Synthetic oligonucleotide
cggatgagctgcagctcgt

SEQ ID NO: 6125 - DNA, 19 bp, Artificial Sequence
  Description of Artificial Sequence: Synthetic oligonucleotide
acggatgagctgcagctcg

SEQ ID NO: 6126 - DNA, 19 bp, Artificial Sequence
  Description of Artificial Sequence: Synthetic oligonucleotide
cacggatgagctgcagctc

SEQ ID NO: 6127 - DNA, 19 bp, Artificial Sequence
  Description of Artificial Sequence: Synthetic oligonucleotide
acacggatgagctgcagct

SEQ ID NO: 6128 - DNA, 19 bp, Artificial Sequence
  Description of Artificial Sequence: Synthetic oligonucleotide
cacacggatgagctgcagc

SEQ ID NO: 6129 - DNA, 19 bp, Artificial Sequence
  Description of Artificial Sequence: Synthetic oligonucleotide
ccacacggatgagctgcag

SEQ ID NO: 6130 - DNA, 19 bp, Artificial Sequence
  Description of Artificial Sequence: Synthetic oligonucleotide
tccacacggatgagctgca

SEQ ID NO: 6131 - DNA, 19 bp, Artificial Sequence
  Description of Artificial Sequence: Synthetic oligonucleotide
ctccacacggatgagctgc

SEQ ID NO: 6132 - DNA, 19 bp, Artificial Sequence
  Description of Artificial Sequence: Synthetic oligonucleotide
tctccacacggatgagctg

SEQ ID NO: 6133 - DNA, 19 bp, Artificial Sequence
  Description of Artificial Sequence: Synthetic oligonucleotide
ttctccacacggatgagct

SEQ ID NO: 6134 - DNA, 19 bp, Artificial Sequence
  Description of Artificial Sequence: Synthetic oligonucleotide
cttctccacacggatgagc

SEQ ID NO: 6135 - DNA, 19 bp, Artificial Sequence
  Description of Artificial Sequence: Synthetic oligonucleotide
gcttctccacacggatgag

SEQ ID NO: 6136 - DNA, 19 bp, Artificial Sequence
  Description of Artificial Sequence: Synthetic oligonucleotide
tgcttctccacacggatga

SEQ ID NO: 6137 - DNA, 19 bp, Artificial Sequence
  Description of Artificial Sequence: Synthetic oligonucleotide
ctgcttctccacacggatg

SEQ ID NO: 6138 - DNA, 19 bp, Artificial Sequence
  Description of Artificial Sequence: Synthetic oligonucleotide
actgcttctccacacggat

SEQ ID NO: 6139 - DNA, 19 bp, Artificial Sequence
  Description of Artificial Sequence: Synthetic oligonucleotide
tactgcttctccacacgga

SEQ ID NO: 6140 - DNA, 19 bp, Artificial Sequence
  Description of Artificial Sequence: Synthetic oligonucleotide
atactgcttctccacacgg

SEQ ID NO: 6141 - DNA, 19 bp, Artificial Sequence
  Description of Artificial Sequence: Synthetic oligonucleotide
gatactgcttctccacacg

SEQ ID NO: 6142 - DNA, 19 bp, Artificial Sequence
  Description of Artificial Sequence: Synthetic oligonucleotide
ggatactgcttctccacac

SEQ ID NO: 6143 - DNA, 19 bp, Artificial Sequence
  Description of Artificial Sequence: Synthetic oligonucleotide
gggatactgcttctccaca

SEQ ID NO: 6144 - DNA, 19 bp, Artificial Sequence
  Description of Artificial Sequence: Synthetic oligonucleotide
ggggatactgcttctccac

SEQ ID NO: 6145 - DNA, 19 bp, Artificial Sequence
  Description of Artificial Sequence: Synthetic oligonucleotide
tggggatactgcttctcca

SEQ ID NO: 6146 - DNA, 19 bp, Artificial Sequence
  Description of Artificial Sequence: Synthetic oligonucleotide
gtggggatactgcttctcc

SEQ ID NO: 6147 - DNA, 19 bp, Artificial Sequence
  Description of Artificial Sequence: Synthetic oligonucleotide
ggtggggatactgcttctc

SEQ ID NO: 6148 - DNA, 19 bp, Artificial Sequence
  Description of Artificial Sequence: Synthetic oligonucleotide
tggtggggatactgcttct

SEQ ID NO: 6149 - DNA, 19 bp, Artificial Sequence
  Description of Artificial Sequence: Synthetic oligonucleotide
gtggtggggatactgcttc

SEQ ID NO: 6150 - DNA, 19 bp, Artificial Sequence
  Description of Artificial Sequence: Synthetic oligonucleotide
tgtggtggggatactgctt

SEQ ID NO: 6151 - DNA, 19 bp, Artificial Sequence
  Description of Artificial Sequence: Synthetic oligonucleotide
ctgtggtggggatactgct

SEQ ID NO: 6152 - DNA, 19 bp, Artificial Sequence
  Description of Artificial Sequence: Synthetic oligonucleotide
gctgtggtggggatactgc

SEQ ID NO: 6153 - DNA, 19 bp, Artificial Sequence
  Description of Artificial Sequence: Synthetic oligonucleotide
ggctgtggtggggatactg

SEQ ID NO: 6154 - DNA, 19 bp, Artificial Sequence
  Description of Artificial Sequence: Synthetic oligonucleotide
aggctgtggtggggatact

SEQ ID NO: 6155 - DNA, 19 bp, Artificial Sequence
  Description of Artificial Sequence: Synthetic oligonucleotide
caggctgtggtggggatac

SEQ ID NO: 6156 - DNA, 19 bp, Artificial Sequence
  Description of Artificial Sequence: Synthetic oligonucleotide
ccaggctgtggtggggata

SEQ ID NO: 6157 - DNA, 19 bp, Artificial Sequence
  Description of Artificial Sequence: Synthetic oligonucleotide
tccaggctgtggtggggat

SEQ ID NO: 6158 - DNA, 19 bp, Artificial Sequence
  Description of Artificial Sequence: Synthetic oligonucleotide
gtccaggctgtggtgggga

SEQ ID NO: 6159 - DNA, 19 bp, Artificial Sequence
  Description of Artificial Sequence: Synthetic oligonucleotide
ggtccaggctgtggtgggg

SEQ ID NO: 6160 - DNA, 19 bp, Artificial Sequence
  Description of Artificial Sequence: Synthetic oligonucleotide
tggtccaggctgtggtggg

SEQ ID NO: 6161 - DNA, 19 bp, Artificial Sequence
  Description of Artificial Sequence: Synthetic oligonucleotide
gtggtccaggctgtggtgg

SEQ ID NO: 6162 - DNA, 19 bp, Artificial Sequence
  Description of Artificial Sequence: Synthetic oligonucleotide
ggtggtccaggctgtggtg

SEQ ID NO: 6163 - DNA, 19 bp, Artificial Sequence
  Description of Artificial Sequence: Synthetic oligonucleotide
aggtggtccaggctgtggt

SEQ ID NO: 6164 - DNA, 19 bp, Artificial Sequence
  Description of Artificial Sequence: Synthetic oligonucleotide
caggtggtccaggctgtgg

SEQ ID NO: 6165 - DNA, 19 bp, Artificial Sequence
  Description of Artificial Sequence: Synthetic oligonucleotide
ccaggtggtccaggctgtg

SEQ ID NO: 6166 - DNA, 19 bp, Artificial Sequence
  Description of Artificial Sequence: Synthetic oligonucleotide
accaggtggtccaggctgt

SEQ ID NO: 6167 - DNA, 19 bp, Artificial Sequence
  Description of Artificial Sequence: Synthetic oligonucleotide
caccaggtggtccaggctg

SEQ ID NO: 6168 - DNA, 19 bp, Artificial Sequence
  Description of Artificial Sequence: Synthetic oligonucleotide
ccaccaggtggtccaggct

SEQ ID NO: 6169 - DNA, 19 bp, Artificial Sequence
  Description of Artificial Sequence: Synthetic oligonucleotide
tccaccaggtggtccaggc

SEQ ID NO: 6170 - DNA, 19 bp, Artificial Sequence
  Description of Artificial Sequence: Synthetic oligonucleotide
ctccaccaggtggtccagg

SEQ ID NO: 6171 - DNA, 19 bp, Artificial Sequence
  Description of Artificial Sequence: Synthetic oligonucleotide
cctccaccaggtggtccag

SEQ ID NO: 6172 - DNA, 19 bp, Artificial Sequence
  Description of Artificial Sequence: Synthetic oligonucleotide
tcctccaccaggtggtcca

SEQ ID NO: 6173 - DNA, 19 bp, Artificial Sequence
  Description of Artificial Sequence: Synthetic oligonucleotide
ctcctccaccaggtggtcc

SEQ ID NO: 6174 - DNA, 19 bp, Artificial Sequence
  Description of Artificial Sequence: Synthetic oligonucleotide
gctcctccaccaggtggtc

SEQ ID NO: 6175 - DNA, 19 bp, Artificial Sequence
  Description of Artificial Sequence: Synthetic oligonucleotide
agctcctccaccaggtggt

SEQ ID NO: 6176 - DNA, 19 bp, Artificial Sequence
  Description of Artificial Sequence: Synthetic oligonucleotide
gagctcctccaccaggtgg

SEQ ID NO: 6177 - DNA, 19 bp, Artificial Sequence
  Description of Artificial Sequence: Synthetic oligonucleotide
agagctcctccaccaggtg

SEQ ID NO: 6178 - DNA, 19 bp, Artificial Sequence
  Description of Artificial Sequence: Synthetic oligonucleotide
aagagctcctccaccaggt

SEQ ID NO: 6179 - DNA, 19 bp, Artificial Sequence
  Description of Artificial Sequence: Synthetic oligonucleotide
gaagagctcctccaccagg

SEQ ID NO: 6180 - DNA, 19 bp, Artificial Sequence
  Description of Artificial Sequence: Synthetic oligonucleotide
ggaagagctcctccaccag

SEQ ID NO: 6181 - DNA, 19 bp, Artificial Sequence
  Description of Artificial Sequence: Synthetic oligonucleotide
aggaagagctcctccacca

SEQ ID NO: 6182 - DNA, 19 bp, Artificial Sequence
  Description of Artificial Sequence: Synthetic oligonucleotide
caggaagagctcctccacc

SEQ ID NO: 6183 - DNA, 19 bp, Artificial Sequence
  Description of Artificial Sequence: Synthetic oligonucleotide
ccaggaagagctcctccac

SEQ ID NO: 6184 - DNA, 19 bp, Artificial Sequence
  Description of Artificial Sequence: Synthetic oligonucleotide
cccaggaagagctcctcca

SEQ ID NO: 6185 - DNA, 19 bp, Artificial Sequence
  Description of Artificial Sequence: Synthetic oligonucleotide
gcccaggaagagctcctcc

SEQ ID NO: 6186 - DNA, 19 bp, Artificial Sequence
  Description of Artificial Sequence: Synthetic oligonucleotide
cgcccaggaagagctcctc

SEQ ID NO: 6187 - DNA, 19 bp, Artificial Sequence
  Description of Artificial Sequence: Synthetic oligonucleotide
tcgcccaggaagagctcct

SEQ ID NO: 6188 - DNA, 19 bp, Artificial Sequence
  Description of Artificial Sequence: Synthetic oligonucleotide
gtcgcccaggaagagctcc

SEQ ID NO: 6189 - DNA, 19 bp, Artificial Sequence
  Description of Artificial Sequence: Synthetic oligonucleotide
tgtcgcccaggaagagctc

SEQ ID NO: 6190 - DNA, 19 bp, Artificial Sequence
  Description of Artificial Sequence: Synthetic oligonucleotide
atgtcgcccaggaagagct

SEQ ID NO: 6191 - DNA, 19 bp, Artificial Sequence
  Description of Artificial Sequence: Synthetic oligonucleotide
gatgtcgcccaggaagagc

SEQ ID NO: 6192 - DNA, 19 bp, Artificial Sequence
  Description of Artificial Sequence: Synthetic oligonucleotide
ggatgtcgcccaggaagag

SEQ ID NO: 6193 - DNA, 19 bp, Artificial Sequence
  Description of Artificial Sequence: Synthetic oligonucleotide
tggatgtcgcccaggaaga

SEQ ID NO: 6194 - DNA, 19 bp, Artificial Sequence
  Description of Artificial Sequence: Synthetic oligonucleotide
gtggatgtcgcccaggaag

SEQ ID NO: 6195 - DNA, 19 bp, Artificial Sequence
  Description of Artificial Sequence: Synthetic oligonucleotide
tgtggatgtcgcccaggaa

SEQ ID NO: 6196 - DNA, 19 bp, Artificial Sequence
  Description of Artificial Sequence: Synthetic oligonucleotide
gtgtggatgtcgcccagga

SEQ ID NO: 6197 - DNA, 19 bp, Artificial Sequence
  Description of Artificial Sequence: Synthetic oligonucleotide
cgtgtggatgtcgcccagg

SEQ ID NO: 6198 - DNA, 19 bp, Artificial Sequence
  Description of Artificial Sequence: Synthetic oligonucleotide
ccgtgtggatgtcgcccag

SEQ ID NO: 6199 - DNA, 19 bp, Artificial Sequence
  Description of Artificial Sequence: Synthetic oligonucleotide
tccgtgtggatgtcgccca

SEQ ID NO: 6200 - DNA, 19 bp, Artificial Sequence
  Description of Artificial Sequence: Synthetic oligonucleotide
gtccgtgtggatgtcgccc

SEQ ID NO: 6201 - DNA, 19 bp, Artificial Sequence
  Description of Artificial Sequence: Synthetic oligonucleotide
cgtccgtgtggatgtcgcc

SEQ ID NO: 6202 - DNA, 19 bp, Artificial Sequence
  Description of Artificial Sequence: Synthetic oligonucleotide
gcgtccgtgtggatgtcgc

SEQ ID NO: 6203 - DNA, 19 bp, Artificial Sequence
  Description of Artificial Sequence: Synthetic oligonucleotide
agcgtccgtgtggatgtcg

SEQ ID NO: 6204 - DNA, 19 bp, Artificial Sequence
  Description of Artificial Sequence: Synthetic oligonucleotide
tagcgtccgtgtggatgtc

SEQ ID NO: 6205 - DNA, 19 bp, Artificial Sequence
  Description of Artificial Sequence: Synthetic oligonucleotide
gtagcgtccgtgtggatgt

SEQ ID NO: 6206 - DNA, 19 bp, Artificial Sequence
  Description of Artificial Sequence: Synthetic oligonucleotide
ggtagcgtccgtgtggatg

SEQ ID NO: 6207 - DNA, 19 bp, Artificial Sequence
  Description of Artificial Sequence: Synthetic oligonucleotide
gggtagcgtccgtgtggat

SEQ ID NO: 6208 - DNA, 19 bp, Artificial Sequence
  Description of Artificial Sequence: Synthetic oligonucleotide
tgggtagcgtccgtgtgga

SEQ ID NO: 6209 - DNA, 19 bp, Artificial Sequence
  Description of Artificial Sequence: Synthetic oligonucleotide
ctgggtagcgtccgtgtgg

SEQ ID NO: 6210 - DNA, 19 bp, Artificial Sequence
  Description of Artificial Sequence: Synthetic oligonucleotide
tctgggtagcgtccgtgtg

SEQ ID NO: 6211 - DNA, 19 bp, Artificial Sequence
  Description of Artificial Sequence: Synthetic oligonucleotide
ctctgggtagcgtccgtgt

SEQ ID NO: 6212 - DNA, 19 bp, Artificial Sequence
  Description of Artificial Sequence: Synthetic oligonucleotide
cctctgggtagcgtccgtg

SEQ ID NO: 6213 - DNA, 19 bp, Artificial Sequence
  Description of Artificial Sequence: Synthetic oligonucleotide
ccctctgggtagcgtccgt

SEQ ID NO: 6214 - DNA, 19 bp, Artificial Sequence
  Description of Artificial Sequence: Synthetic oligonucleotide
accctctgggtagcgtccg

SEQ ID NO: 6215 - DNA, 19 bp, Artificial Sequence
  Description of Artificial Sequence: Synthetic oligonucleotide
caccctctgggtagcgtcc

SEQ ID NO: 6216 - DNA, 19 bp, Artificial Sequence
  Description of Artificial Sequence: Synthetic oligonucleotide
acaccctctgggtagcgtc

SEQ ID NO: 6217 - DNA, 19 bp, Artificial Sequence
  Description of Artificial Sequence: Synthetic oligonucleotide
aacaccctctgggtagcgt

SEQ ID NO: 6218 - DNA, 19 bp, Artificial Sequence
  Description of Artificial Sequence: Synthetic oligonucleotide
gaacaccctctgggtagcg

SEQ ID NO: 6219 - DNA, 19 bp, Artificial Sequence
  Description of Artificial Sequence: Synthetic oligonucleotide
agaacaccctctgggtagc

SEQ ID NO: 6220 - DNA, 19 bp, Artificial Sequence
  Description of Artificial Sequence: Synthetic oligonucleotide
tagaacaccctctgggtag

SEQ ID NO: 6221 - DNA, 19 bp, Artificial Sequence
  Description of Artificial Sequence: Synthetic oligonucleotide
gtagaacaccctctgggta

SEQ ID NO: 6222 - DNA, 19 bp, Artificial Sequence
  Description of Artificial Sequence: Synthetic oligonucleotide
ggtagaacaccctctgggt

SEQ ID NO: 6223 - DNA, 19 bp, Artificial Sequence
  Description of Artificial Sequence: Synthetic oligonucleotide
cggtagaacaccctctggg

SEQ ID NO: 6224 - DNA, 19 bp, Artificial Sequence
  Description of Artificial Sequence: Synthetic oligonucleotide
ccggtagaacaccctctgg

SEQ ID NO: 6225 - DNA, 19 bp, Artificial Sequence
  Description of Artificial Sequence: Synthetic oligonucleotide
gccggtagaacaccctctg

SEQ ID NO: 6226 - DNA, 19 bp, Artificial Sequence
  Description of Artificial Sequence: Synthetic oligonucleotide
ggccggtagaacaccctct

SEQ ID NO: 6227 - DNA, 19 bp, Artificial Sequence
  Description of Artificial Sequence: Synthetic oligonucleotide
cggccggtagaacaccctc

SEQ ID NO: 6228 - DNA, 19 bp, Artificial Sequence
  Description of Artificial Sequence: Synthetic oligonucleotide
acggccggtagaacaccct

SEQ ID NO: 6229 - DNA, 19 bp, Artificial Sequence
  Description of Artificial Sequence: Synthetic oligonucleotide
gacggccggtagaacaccc

SEQ ID NO: 6230 - DNA, 19 bp, Artificial Sequence
  Description of Artificial Sequence: Synthetic oligonucleotide
ggacggccggtagaacacc

SEQ ID NO: 6231 - DNA, 19 bp, Artificial Sequence
  Description of Artificial Sequence: Synthetic oligonucleotide
tggacggccggtagaacac

SEQ ID NO: 6232 - DNA, 19 bp, Artificial Sequence
  Description of Artificial Sequence: Synthetic oligonucleotide
ctggacggccggtagaaca

SEQ ID NO: 6233 - DNA, 19 bp, Artificial Sequence
  Description of Artificial Sequence: Synthetic oligonucleotide
actggacggccggtagaac

SEQ ID NO: 6234 - DNA, 19 bp, Artificial Sequence
  Description of Artificial Sequence: Synthetic oligonucleotide
aactggacggccggtagaa

SEQ ID NO: 6235 - DNA, 19 bp, Artificial Sequence
  Description of Artificial Sequence: Synthetic oligonucleotide
taactggacggccggtaga

SEQ ID NO: 6236 - DNA, 19 bp, Artificial Sequence
  Description of Artificial Sequence: Synthetic oligonucleotide
gtaactggacggccggtag

SEQ ID NO: 6237 - DNA, 19 bp, Artificial Sequence
  Description of Artificial Sequence: Synthetic oligonucleotide
ggtaactggacggccggta

SEQ ID NO: 6238 - DNA, 19 bp, Artificial Sequence
  Description of Artificial Sequence: Synthetic oligonucleotide
tggtaactggacggccggt

SEQ ID NO: 6239 - DNA, 19 bp, Artificial Sequence
  Description of Artificial Sequence: Synthetic oligonucleotide
ctggtaactggacggccgg

SEQ ID NO: 6240 - DNA, 19 bp, Artificial Sequence
  Description of Artificial Sequence: Synthetic oligonucleotide
gctggtaactggacggccg

SEQ ID NO: 6241 - DNA, 19 bp, Artificial Sequence
  Description of Artificial Sequence: Synthetic oligonucleotide
ggctggtaactggacggcc

SEQ ID NO: 6242 - DNA, 19 bp, Artificial Sequence
  Description of Artificial Sequence: Synthetic oligonucleotide
cggctggtaactggacggc

SEQ ID NO: 6243 - DNA, 19 bp, Artificial Sequence
  Description of Artificial Sequence: Synthetic oligonucleotide
gcggctggtaactggacgg

SEQ ID NO: 6244 - DNA, 19 bp, Artificial Sequence
  Description of Artificial Sequence: Synthetic oligonucleotide
ggcggctggtaactggacg

SEQ ID NO: 6245 - DNA, 19 bp, Artificial Sequence
  Description of Artificial Sequence: Synthetic oligonucleotide
gggcggctggtaactggac

SEQ ID NO: 6246 - DNA, 19 bp, Artificial Sequence
  Description of Artificial Sequence: Synthetic oligonucleotide
ggggcggctggtaactgga

SEQ ID NO: 6247 - DNA, 19 bp, Artificial Sequence
  Description of Artificial Sequence: Synthetic oligonucleotide
aggggcggctggtaactgg

SEQ ID NO: 6248 - DNA, 19 bp, Artificial Sequence
  Description of Artificial Sequence: Synthetic oligonucleotide
caggggcggctggtaactg

SEQ ID NO: 6249 - DNA, 19 bp, Artificial Sequence
  Description of Artificial Sequence: Synthetic oligonucleotide
gcaggggcggctggtaact

SEQ ID NO: 6250 - DNA, 19 bp, Artificial Sequence
  Description of Artificial Sequence: Synthetic oligonucleotide
tgcaggggcggctggtaac

SEQ ID NO: 6251 - DNA, 19 bp, Artificial Sequence
  Description of Artificial Sequence: Synthetic oligonucleotide
ctgcaggggcggctggtaa

SEQ ID NO: 6252 - DNA, 19 bp, Artificial Sequence
  Description of Artificial Sequence: Synthetic oligonucleotide
tctgcaggggcggctggta

SEQ ID NO: 6253 - DNA, 19 bp, Artificial Sequence
  Description of Artificial Sequence: Synthetic oligonucleotide
ttctgcaggggcggctggt

SEQ ID NO: 6254 - DNA, 19 bp, Artificial Sequence
  Description of Artificial Sequence: Synthetic oligonucleotide
attctgcaggggcggctgg

SEQ ID NO: 6255 - DNA, 19 bp, Artificial Sequence
  Description of Artificial Sequence: Synthetic oligonucleotide
cattctgcaggggcggctg

SEQ ID NO: 6256 - DNA, 19 bp, Artificial Sequence
  Description of Artificial Sequence: Synthetic oligonucleotide
gcattctgcaggggcggct

SEQ ID NO: 6257 - DNA, 19 bp, Artificial Sequence
  Description of Artificial Sequence: Synthetic oligonucleotide
ggcattctgcaggggcggc

SEQ ID NO: 6258 - DNA, 19 bp, Artificial Sequence
  Description of Artificial Sequence: Synthetic oligonucleotide
tggcattctgcaggggcgg

SEQ ID NO: 6259 - DNA, 19 bp, Artificial Sequence
  Description of Artificial Sequence: Synthetic oligonucleotide
ttggcattctgcaggggcg

SEQ ID NO: 6260 - DNA, 19 bp, Artificial Sequence
  Description of Artificial Sequence: Synthetic oligonucleotide
cttggcattctgcaggggc

SEQ ID NO: 6261 - DNA, 19 bp, Artificial Sequence
  Description of Artificial Sequence: Synthetic oligonucleotide
tcttggcattctgcagggg

SEQ ID NO: 6262 - DNA, 19 bp, Artificial Sequence
  Description of Artificial Sequence: Synthetic oligonucleotide
ttcttggcattctgcaggg

SEQ ID NO: 6263 - DNA, 19 bp, Artificial Sequence
  Description of Artificial Sequence: Synthetic oligonucleotide
gttcttggcattctgcagg

SEQ ID NO: 6264 - DNA, 19 bp, Artificial Sequence
  Description of Artificial Sequence: Synthetic oligonucleotide
ggttcttggcattctgcag

SEQ ID NO: 6265 - DNA, 19 bp, Artificial Sequence
  Description of Artificial Sequence: Synthetic oligonucleotide
tggttcttggcattctgca

SEQ ID NO: 6266 - DNA, 19 bp, Artificial Sequence
  Description of Artificial Sequence: Synthetic oligonucleotide
gtggttcttggcattctgc

SEQ ID NO: 6267 - DNA, 19 bp, Artificial Sequence
  Description of Artificial Sequence: Synthetic oligonucleotide
tgtggttcttggcattctg

SEQ ID NO: 6268 - DNA, 19 bp, Artificial Sequence
  Description of Artificial Sequence: Synthetic oligonucleotide
ttgtggttcttggcattct

SEQ ID NO: 6269 - DNA, 19 bp, Artificial Sequence
  Description of Artificial Sequence: Synthetic oligonucleotide
gttgtggttcttggcattc

SEQ ID NO: 6270 - DNA, 19 bp, Artificial Sequence
  Description of Artificial Sequence: Synthetic oligonucleotide
ggttgtggttcttggcatt

SEQ ID NO: 6271 - DNA, 19 bp, Artificial Sequence
  Description of Artificial Sequence: Synthetic oligonucleotide
tggttgtggttcttggcat

SEQ ID NO: 6272 - DNA, 19 bp, Artificial Sequence
  Description of Artificial Sequence: Synthetic oligonucleotide
atggttgtggttcttggca

SEQ ID NO: 6273 - DNA, 19 bp, Artificial Sequence
  Description of Artificial Sequence: Synthetic oligonucleotide
catggttgtggttcttggc

SEQ ID NO: 6274 - DNA, 19 bp, Artificial Sequence
  Description of Artificial Sequence: Synthetic oligonucleotide
gcatggttgtggttcttgg

SEQ ID NO: 6275 - DNA, 19 bp, Artificial Sequence
  Description of Artificial Sequence: Synthetic oligonucleotide
cgcatggttgtggttcttg

SEQ ID NO: 6276 - DNA, 19 bp, Artificial Sequence
  Description of Artificial Sequence: Synthetic oligonucleotide
acgcatggttgtggttctt

SEQ ID NO: 6277 - DNA, 19 bp, Artificial Sequence
  Description of Artificial Sequence: Synthetic oligonucleotide
cacgcatggttgtggttct

SEQ ID NO: 6278 - DNA, 19 bp, Artificial Sequence
  Description of Artificial Sequence: Synthetic oligonucleotide
gcacgcatggttgtggttc

SEQ ID NO: 6279 - DNA, 19 bp, Artificial Sequence
  Description of Artificial Sequence: Synthetic oligonucleotide
tgcacgcatggttgtggtt

SEQ ID NO: 6280 - DNA, 19 bp, Artificial Sequence
  Description of Artificial Sequence: Synthetic oligonucleotide
atgcacgcatggttgtggt

SEQ ID NO: 6281 - DNA, 19 bp, Artificial Sequence
  Description of Artificial Sequence: Synthetic oligonucleotide
tatgcacgcatggttgtgg

SEQ ID NO: 6282 - DNA, 19 bp, Artificial Sequence
  Description of Artificial Sequence: Synthetic oligonucleotide
ctatgcacgcatggttgtg

SEQ ID NO: 6283 - DNA, 19 bp, Artificial Sequence
  Description of Artificial Sequence: Synthetic oligonucleotide
gctatgcacgcatggttgt

SEQ ID NO: 6284 - DNA, 19 bp, Artificial Sequence
  Description of Artificial Sequence: Synthetic oligonucleotide
ggctatgcacgcatggttg

SEQ ID NO: 6285 - DNA, 19 bp, Artificial Sequence
  Description of Artificial Sequence: Synthetic oligonucleotide
aggctatgcacgcatggtt

SEQ ID NO: 6286 - DNA, 19 bp, Artificial Sequence
  Description of Artificial Sequence: Synthetic oligonucleotide
caggctatgcacgcatggt

SEQ ID NO: 6287 - DNA, 19 bp, Artificial Sequence
  Description of Artificial Sequence: Synthetic oligonucleotide
gcaggctatgcacgcatgg

SEQ ID NO: 6288 - DNA, 19 bp, Artificial Sequence
  Description of Artificial Sequence: Synthetic oligonucleotide
ggcaggctatgcacgcatg

SEQ ID NO: 6289 - DNA, 19 bp, Artificial Sequence
  Description of Artificial Sequence: Synthetic oligonucleotide
cggcaggctatgcacgcat

SEQ ID NO: 6290 - DNA, 19 bp, Artificial Sequence
  Description of Artificial Sequence: Synthetic oligonucleotide
gcggcaggctatgcacgca

SEQ ID NO: 6291 - DNA, 19 bp, Artificial Sequence
  Description of Artificial Sequence: Synthetic oligonucleotide
tgcggcaggctatgcacgc

SEQ ID NO: 6292 - DNA, 19 bp, Artificial Sequence
  Description of Artificial Sequence: Synthetic oligonucleotide
atgcggcaggctatgcacg

SEQ ID NO: 6293 - DNA, 19 bp, Artificial Sequence
  Description of Artificial Sequence: Synthetic oligonucleotide
gatgcggcaggctatgcac

SEQ ID NO: 6294 - DNA, 19 bp, Artificial Sequence
  Description of Artificial Sequence: Synthetic oligonucleotide
tgatgcggcaggctatgca

SEQ ID NO: 6295 - DNA, 19 bp, Artificial Sequence
  Description of Artificial Sequence: Synthetic oligonucleotide
atgatgcggcaggctatgc

SEQ ID NO: 6296 - DNA, 19 bp, Artificial Sequence
  Description of Artificial Sequence: Synthetic oligonucleotide
aatgatgcggcaggctatg

SEQ ID NO: 6297 - DNA, 19 bp, Artificial Sequence
  Description of Artificial Sequence: Synthetic oligonucleotide
aaatgatgcggcaggctat

SEQ ID NO: 6298 - DNA, 19 bp, Artificial Sequence
  Description of Artificial Sequence: Synthetic oligonucleotide
aaaatgatgcggcaggcta

SEQ ID NO: 6299 - DNA, 19 bp, Artificial Sequence
  Description of Artificial Sequence: Synthetic oligonucleotide
gaaaatgatgcggcaggct

SEQ ID NO: 6300 - DNA, 19 bp, Artificial Sequence
  Description of Artificial Sequence: Synthetic oligonucleotide
ggaaaatgatgcggcaggc

SEQ ID NO: 6301 - DNA, 19 bp, Artificial Sequence
  Description of Artificial Sequence: Synthetic oligonucleotide
cggaaaatgatgcggcagg

SEQ ID NO: 6302 - DNA, 19 bp, Artificial Sequence
  Description of Artificial Sequence: Synthetic oligonucleotide
ccggaaaatgatgcggcag

SEQ ID NO: 6303 - DNA, 19 bp, Artificial Sequence
  Description of Artificial Sequence: Synthetic oligonucleotide
accggaaaatgatgcggca

SEQ ID NO: 6304 - DNA, 19 bp, Artificial Sequence
  Description of Artificial Sequence: Synthetic oligonucleotide
gaccggaaaatgatgcggc

SEQ ID NO: 6305 - DNA, 19 bp, Artificial Sequence
  Description of Artificial Sequence: Synthetic oligonucleotide
tgaccggaaaatgatgcgg

SEQ ID NO: 6306 - DNA, 19 bp, Artificial Sequence
  Description of Artificial Sequence: Synthetic oligonucleotide
ctgaccggaaaatgatgcg

SEQ ID NO: 6307 - DNA, 19 bp, Artificial Sequence
  Description of Artificial Sequence: Synthetic oligonucleotide
tctgaccggaaaatgatgc

SEQ ID NO: 6308 - DNA, 19 bp, Artificial Sequence
  Description of Artificial Sequence: Synthetic oligonucleotide
atctgaccggaaaatgatg

SEQ ID NO: 6309 - DNA, 19 bp, Artificial Sequence
  Description of Artificial Sequence: Synthetic oligonucleotide
catctgaccggaaaatgat

SEQ ID NO: 6310 - DNA, 19 bp, Artificial Sequence
  Description of Artificial Sequence: Synthetic oligonucleotide
tcatctgaccggaaaatga

SEQ ID NO: 6311 - DNA, 19 bp, Artificial Sequence
  Description of Artificial Sequence: Synthetic oligonucleotide
ttcatctgaccggaaaatg

SEQ ID NO: 6312 - DNA, 19 bp, Artificial Sequence
  Description of Artificial Sequence: Synthetic oligonucleotide
gttcatctgaccggaaaat

SEQ ID NO: 6313 - DNA, 19 bp, Artificial Sequence
  Description of Artificial Sequence: Synthetic oligonucleotide
tgttcatctgaccggaaaa

SEQ ID NO: 6314 - DNA, 19 bp, Artificial Sequence
  Description of Artificial Sequence: Synthetic oligonucleotide
gtgttcatctgaccggaaa

SEQ ID NO: 6315 - DNA, 19 bp, Artificial Sequence
  Description of Artificial Sequence: Synthetic oligonucleotide
ggtgttcatctgaccggaa

SEQ ID NO: 6316 - DNA, 19 bp, Artificial Sequence
  Description of Artificial Sequence: Synthetic oligonucleotide
tggtgttcatctgaccgga

SEQ ID NO: 6317 - DNA, 19 bp, Artificial Sequence
  Description of Artificial Sequence: Synthetic oligonucleotide
gtggtgttcatctgaccgg

SEQ ID NO: 6318 - DNA, 19 bp, Artificial Sequence
  Description of Artificial Sequence: Synthetic oligonucleotide
ggtggtgttcatctgaccg

SEQ ID NO: 6319 - DNA, 19 bp, Artificial Sequence
  Description of Artificial Sequence: Synthetic oligonucleotide
gggtggtgttcatctgacc

SEQ ID NO: 6320 - DNA, 19 bp, Artificial Sequence
  Description of Artificial Sequence: Synthetic oligonucleotide
agggtggtgttcatctgac

SEQ ID NO: 6321 - DNA, 19 bp, Artificial Sequence
  Description of Artificial Sequence: Synthetic oligonucleotide
gagggtggtgttcatctga

SEQ ID NO: 6322 - DNA, 19 bp, Artificial Sequence
  Description of Artificial Sequence: Synthetic oligonucleotide
ggagggtggtgttcatctg

SEQ ID NO: 6323 - DNA, 19 bp, Artificial Sequence
  Description of Artificial Sequence: Synthetic oligonucleotide
gggagggtggtgttcatct

SEQ ID NO: 6324 - DNA, 19 bp, Artificial Sequence
  Description of Artificial Sequence: Synthetic oligonucleotide
tgggagggtggtgttcatc

SEQ ID NO: 6325 - DNA, 19 bp, Artificial Sequence
  Description of Artificial Sequence: Synthetic oligonucleotide
atgggagggtggtgttcat

SEQ ID NO: 6326 - DNA, 19 bp, Artificial Sequence
  Description of Artificial Sequence: Synthetic oligonucleotide
tatgggagggtggtgttca

SEQ ID NO: 6327 - DNA, 19 bp, Artificial Sequence
  Description of Artificial Sequence: Synthetic oligonucleotide
gtatgggagggtggtgttc

SEQ ID NO: 6328 - DNA, 19 bp, Artificial Sequence
  Description of Artificial Sequence: Synthetic oligonucleotide
agtatgggagggtggtgtt

SEQ ID NO: 6329 - DNA, 19 bp, Artificial Sequence
  Description of Artificial Sequence: Synthetic oligonucleotide
cagtatgggagggtggtgt

SEQ ID NO: 6330 - DNA, 19 bp, Artificial Sequence
  Description of Artificial Sequence: Synthetic oligonucleotide
gcagtatgggagggtggtg

SEQ ID NO: 6331 - DNA, 19 bp, Artificial Sequence
  Description of Artificial Sequence: Synthetic oligonucleotide
ggcagtatgggagggtggt

SEQ ID NO: 6332 - DNA, 19 bp, Artificial Sequence
  Description of Artificial Sequence: Synthetic oligonucleotide
gggcagtatgggagggtgg

SEQ ID NO: 6333 - DNA, 19 bp, Artificial Sequence
  Description of Artificial Sequence: Synthetic oligonucleotide
ggggcagtatgggagggtg

SEQ ID NO: 6334 - DNA, 19 bp, Artificial Sequence
  Description of Artificial Sequence: Synthetic oligonucleotide
gggggcagtatgggagggt

SEQ ID NO: 6335 - DNA, 19 bp, Artificial Sequence
  Description of Artificial Sequence: Synthetic oligonucleotide
ggggggcagtatgggaggg

SEQ ID NO: 6336 - DNA, 19 bp, Artificial Sequence
  Description of Artificial Sequence: Synthetic oligonucleotide
tggggggcagtatgggagg

SEQ ID NO: 6337 - DNA, 19 bp, Artificial Sequence
  Description of Artificial Sequence: Synthetic oligonucleotide
ttggggggcagtatgggag

SEQ ID NO: 6338 - DNA, 19 bp, Artificial Sequence
  Description of Artificial Sequence: Synthetic oligonucleotide
cttggggggcagtatggga

SEQ ID NO: 6339 - DNA, 19 bp, Artificial Sequence
  Description of Artificial Sequence: Synthetic oligonucleotide
ccttggggggcagtatggg

SEQ ID NO: 6340 - DNA, 19 bp, Artificial Sequence
  Description of Artificial Sequence: Synthetic oligonucleotide
gccttggggggcagtatgg

SEQ ID NO: 6341 - DNA, 19 bp, Artificial Sequence
  Description of Artificial Sequence: Synthetic oligonucleotide
agccttggggggcagtatg

SEQ ID NO: 6342 - DNA, 19 bp, Artificial Sequence
  Description of Artificial Sequence: Synthetic oligonucleotide
cagccttggggggcagtat

SEQ ID NO: 6343 - DNA, 19 bp, Artificial Sequence
  Description of Artificial Sequence: Synthetic oligonucleotide
tcagccttggggggcagta

SEQ ID NO: 6344 - DNA, 19 bp, Artificial Sequence
  Description of Artificial Sequence: Synthetic oligonucleotide
gtcagccttggggggcagt

SEQ ID NO: 6345 - DNA, 19 bp, Artificial Sequence
  Description of Artificial Sequence: Synthetic oligonucleotide
ggtcagccttggggggcag

SEQ ID NO: 6346 - DNA, 19 bp, Artificial Sequence
  Description of Artificial Sequence: Synthetic oligonucleotide
aggtcagccttggggggca

SEQ ID NO: 6347 - DNA, 19 bp, Artificial Sequence
  Description of Artificial Sequence: Synthetic oligonucleotide
caggtcagccttggggggc

SEQ ID NO: 6348 - DNA, 19 bp, Artificial Sequence
  Description of Artificial Sequence: Synthetic oligonucleotide
tcaggtcagccttgggggg

SEQ ID NO: 6349 - DNA, 19 bp, Artificial Sequence
  Description of Artificial Sequence: Synthetic oligonucleotide
gtcaggtcagccttggggg

SEQ ID NO: 6350 - DNA, 19 bp, Artificial Sequence
  Description of Artificial Sequence: Synthetic oligonucleotide
ggtcaggtcagccttgggg

SEQ ID NO: 6351 - DNA, 19 bp, Artificial Sequence
  Description of Artificial Sequence: Synthetic oligonucleotide
tggtcaggtcagccttggg

SEQ ID NO: 6352 - DNA, 19 bp, Artificial Sequence
  Description of Artificial Sequence: Synthetic oligonucleotide
atggtcaggtcagccttgg

SEQ ID NO: 6353 - DNA, 19 bp, Artificial Sequence
  Description of Artificial Sequence: Synthetic oligonucleotide
aatggtcaggtcagccttg

SEQ ID NO: 6354 - DNA, 19 bp, Artificial Sequence
  Description of Artificial Sequence: Synthetic oligonucleotide
caatggtcaggtcagcctt

SEQ ID NO: 6355 - DNA, 19 bp, Artificial Sequence
  Description of Artificial Sequence: Synthetic oligonucleotide
ccaatggtcaggtcagcct

SEQ ID NO: 6356 - DNA, 19 bp, Artificial Sequence
  Description of Artificial Sequence: Synthetic oligonucleotide
gccaatggtcaggtcagcc

SEQ ID NO: 6357 - DNA, 19 bp, Artificial Sequence
  Description of Artificial Sequence: Synthetic oligonucleotide
ggccaatggtcaggtcagc

SEQ ID NO: 6358 - DNA, 19 bp, Artificial Sequence
  Description of Artificial Sequence: Synthetic oligonucleotide
aggccaatggtcaggtcag

SEQ ID NO: 6359 - DNA, 19 bp, Artificial Sequence
  Description of Artificial Sequence: Synthetic oligonucleotide
gaggccaatggtcaggtca

SEQ ID NO: 6360 - DNA, 19 bp, Artificial Sequence
  Description of Artificial Sequence: Synthetic oligonucleotide
ggaggccaatggtcaggtc

SEQ ID NO: 6361 - DNA, 19 bp, Artificial Sequence
  Description of Artificial Sequence: Synthetic oligonucleotide
tggaggccaatggtcaggt

SEQ ID NO: 6362 - DNA, 19 bp, Artificial Sequence
  Description of Artificial Sequence: Synthetic oligonucleotide
gtggaggccaatggtcagg

SEQ ID NO: 6363 - DNA, 19 bp, Artificial Sequence
  Description of Artificial Sequence: Synthetic oligonucleotide
cgtggaggccaatggtcag

SEQ ID NO: 6364 - DNA, 19 bp, Artificial Sequence
  Description of Artificial Sequence: Synthetic oligonucleotide
ccgtggaggccaatggtca

SEQ ID NO: 6365 - DNA, 19 bp, Artificial Sequence
  Description of Artificial Sequence: Synthetic oligonucleotide
cccgtggaggccaatggtc

SEQ ID NO: 6366 - DNA, 19 bp, Artificial Sequence
  Description of Artificial Sequence: Synthetic oligonucleotide
ccccgtggaggccaatggt

SEQ ID NO: 6367 - DNA, 19 bp, Artificial Sequence
  Description of Artificial Sequence: Synthetic oligonucleotide
tccccgtggaggccaatgg

SEQ ID NO: 6368 - DNA, 19 bp, Artificial Sequence
  Description of Artificial Sequence: Synthetic oligonucleotide
ttccccgtggaggccaatg

SEQ ID NO: 6369 - DNA, 19 bp, Artificial Sequence
  Description of Artificial Sequence: Synthetic oligonucleotide
attccccgtggaggccaat

SEQ ID NO: 6370 - DNA, 19 bp, Artificial Sequence
  Description of Artificial Sequence: Synthetic oligonucleotide
cattccccgtggaggccaa

SEQ ID NO: 6371 - DNA, 19 bp, Artificial Sequence
  Description of Artificial Sequence: Synthetic oligonucleotide
ccattccccgtggaggcca

SEQ ID NO: 6372 - DNA, 19 bp, Artificial Sequence
  Description of Artificial Sequence: Synthetic oligonucleotide
cccattccccgtggaggcc

SEQ ID NO: 6373 - DNA, 19 bp, Artificial Sequence
  Description of Artificial Sequence: Synthetic oligonucleotide
acccattccccgtggaggc

SEQ ID NO: 6374 - DNA, 19 bp, Artificial Sequence
  Description of Artificial Sequence: Synthetic oligonucleotide
cacccattccccgtggagg

SEQ ID NO: 6375 - DNA, 19 bp, Artificial Sequence
  Description of Artificial Sequence: Synthetic oligonucleotide
tcacccattccccgtggag

SEQ ID NO: 6376 - DNA, 19 bp, Artificial Sequence
  Description of Artificial Sequence: Synthetic oligonucleotide
ctcacccattccccgtgga

SEQ ID NO: 6377 - DNA, 19 bp, Artificial Sequence
  Description of Artificial Sequence: Synthetic oligonucleotide
gctcacccattccccgtgg

SEQ ID NO: 6378 - DNA, 19 bp, Artificial Sequence
  Description of Artificial Sequence: Synthetic oligonucleotide
ggctcacccattccccgtg

SEQ ID NO: 6379 - DNA, 19 bp, Artificial Sequence
  Description of Artificial Sequence: Synthetic oligonucleotide
tggctcacccattccccgt

SEQ ID NO: 6380 - DNA, 19 bp, Artificial Sequence
  Description of Artificial Sequence: Synthetic oligonucleotide
ctggctcacccattccccg

SEQ ID NO: 6381 - DNA, 19 bp, Artificial Sequence
  Description of Artificial Sequence: Synthetic oligonucleotide
gctggctcacccattcccc

SEQ ID NO: 6382 - DNA, 19 bp, Artificial Sequence
  Description of Artificial Sequence: Synthetic oligonucleotide
cgctggctcacccattccc

SEQ ID NO: 6383 - DNA, 19 bp, Artificial Sequence
  Description of Artificial Sequence: Synthetic oligonucleotide
gcgctggctcacccattcc

SEQ ID NO: 6384 - DNA, 19 bp, Artificial Sequence
  Description of Artificial Sequence: Synthetic oligonucleotide
agcgctggctcacccattc

SEQ ID NO: 6385 - DNA, 19 bp, Artificial Sequence
  Description of Artificial Sequence: Synthetic oligonucleotide
cagcgctggctcacccatt

SEQ ID NO: 6386 - DNA, 19 bp, Artificial Sequence
  Description of Artificial Sequence: Synthetic oligonucleotide
gcagcgctggctcacccat

SEQ ID NO: 6387 - DNA, 19 bp, Artificial Sequence
  Description of Artificial Sequence: Synthetic oligonucleotide
cgcagcgctggctcaccca

SEQ ID NO: 6388 - DNA, 19 bp, Artificial Sequence
  Description of Artificial Sequence: Synthetic oligonucleotide
tcgcagcgctggctcaccc

SEQ ID NO: 6389 - DNA, 19 bp, Artificial Sequence
  Description of Artificial Sequence: Synthetic oligonucleotide
ctcgcagcgctggctcacc

SEQ ID NO: 6390 - DNA, 19 bp, Artificial Sequence
  Description of Artificial Sequence: Synthetic oligonucleotide
cctcgcagcgctggctcac

SEQ ID NO: 6391 - DNA, 19 bp, Artificial Sequence
  Description of Artificial Sequence: Synthetic oligonucleotide
acctcgcagcgctggctca

SEQ ID NO: 6392 - DNA, 19 bp, Artificial Sequence
  Description of Artificial Sequence: Synthetic oligonucleotide
tacctcgcagcgctggctc

SEQ ID NO: 6393 - DNA, 19 bp, Artificial Sequence
  Description of Artificial Sequence: Synthetic oligonucleotide
gtacctcgcagcgctggct

SEQ ID NO: 6394 - DNA, 19 bp, Artificial Sequence
  Description of Artificial Sequence: Synthetic oligonucleotide
cgtacctcgcagcgctggc

SEQ ID NO: 6395 - DNA, 19 bp, Artificial Sequence
  Description of Artificial Sequence: Synthetic oligonucleotide
gcgtacctcgcagcgctgg

SEQ ID NO: 6396 - DNA, 19 bp, Artificial Sequence
  Description of Artificial Sequence: Synthetic oligonucleotide
ggcgtacctcgcagcgctg

SEQ ID NO: 6397 - DNA, 19 bp, Artificial Sequence
  Description of Artificial Sequence: Synthetic oligonucleotide
gggcgtacctcgcagcgct

SEQ ID NO: 6398 - DNA, 19 bp, Artificial Sequence
  Description of Artificial Sequence: Synthetic oligonucleotide
ggggcgtacctcgcagcgc

SEQ ID NO: 6399 - DNA, 19 bp, Artificial Sequence
  Description of Artificial Sequence: Synthetic oligonucleotide
cggggcgtacctcgcagcg

SEQ ID NO: 6400 - DNA, 19 bp, Artificial Sequence
  Description of Artificial Sequence: Synthetic oligonucleotide
tcggggcgtacctcgcagc

SEQ ID NO: 6401 - DNA, 19 bp, Artificial Sequence
  Description of Artificial Sequence: Synthetic oligonucleotide
ctcggggcgtacctcgcag

SEQ ID NO: 6402 - DNA, 19 bp, Artificial Sequence
  Description of Artificial Sequence: Synthetic oligonucleotide
cctcggggcgtacctcgca

SEQ ID NO: 6403 - DNA, 19 bp, Artificial Sequence
  Description of Artificial Sequence: Synthetic oligonucleotide
acctcggggcgtacctcgc

SEQ ID NO: 6404 - DNA, 19 bp, Artificial Sequence
  Description of Artificial Sequence: Synthetic oligonucleotide
gacctcggggcgtacctcg

SEQ ID NO: 6405 - DNA, 19 bp, Artificial Sequence
  Description of Artificial Sequence: Synthetic oligonucleotide
ggacctcggggcgtacctc

SEQ ID NO: 6406 - DNA, 19 bp, Artificial Sequence
  Description of Artificial Sequence: Synthetic oligonucleotide
aggacctcggggcgtacct

SEQ ID NO: 6407 - DNA, 19 bp, Artificial Sequence
  Description of Artificial Sequence: Synthetic oligonucleotide
gaggacctcggggcgtacc

SEQ ID NO: 6408 - DNA, 19 bp, Artificial Sequence
  Description of Artificial Sequence: Synthetic oligonucleotide
agaggacctcggggcgtac

SEQ ID NO: 6409 - DNA, 19 bp, Artificial Sequence
  Description of Artificial Sequence: Synthetic oligonucleotide
aagaggacctcggggcgta

SEQ ID NO: 6410 - DNA, 19 bp, Artificial Sequence
  Description of Artificial Sequence: Synthetic oligonucleotide
gaagaggacctcggggcgt

SEQ ID NO: 6411 - DNA, 19 bp, Artificial Sequence
  Description of Artificial Sequence: Synthetic oligonucleotide
ggaagaggacctcggggcg

SEQ ID NO: 6412 - DNA, 19 bp, Artificial Sequence
  Description of Artificial Sequence: Synthetic oligonucleotide
aggaagaggacctcggggc

SEQ ID NO: 6413 - DNA, 19 bp, Artificial Sequence
  Description of Artificial Sequence: Synthetic oligonucleotide
gaggaagaggacctcgggg

SEQ ID NO: 6414 - DNA, 19 bp, Artificial Sequence
  Description of Artificial Sequence: Synthetic oligonucleotide
tgaggaagaggacctcggg

SEQ ID NO: 6415 - DNA, 19 bp, Artificial Sequence
  Description of Artificial Sequence: Synthetic oligonucleotide
gtgaggaagaggacctcgg

SEQ ID NO: 6416 - DNA, 19 bp, Artificial Sequence
  Description of Artificial Sequence: Synthetic oligonucleotide
ggtgaggaagaggacctcg

SEQ ID NO: 6417 - DNA, 19 bp, Artificial Sequence
  Description of Artificial Sequence: Synthetic oligonucleotide
gggtgaggaagaggacctc

SEQ ID NO: 6418 - DNA, 19 bp, Artificial Sequence
  Description of Artificial Sequence: Synthetic oligonucleotide
cgggtgaggaagaggacct

SEQ ID NO: 6419 - DNA, 19 bp, Artificial Sequence
  Description of Artificial Sequence: Synthetic oligonucleotide
gcgggtgaggaagaggacc

SEQ ID NO: 6420 - DNA, 19 bp, Artificial Sequence
  Description of Artificial Sequence: Synthetic oligonucleotide
ggcgggtgaggaagaggac

SEQ ID NO: 6421 - DNA, 19 bp, Artificial Sequence
  Description of Artificial Sequence: Synthetic oligonucleotide
tggcgggtgaggaagagga

SEQ ID NO: 6422 - DNA, 19 bp, Artificial Sequence
  Description of Artificial Sequence: Synthetic oligonucleotide
gtggcgggtgaggaagagg

SEQ ID NO: 6423 - DNA, 19 bp, Artificial Sequence
  Description of Artificial Sequence: Synthetic oligonucleotide
agtggcgggtgaggaagag

SEQ ID NO: 6424 - DNA, 19 bp, Artificial Sequence
  Description of Artificial Sequence: Synthetic oligonucleotide
aagtggcgggtgaggaaga

SEQ ID NO: 6425 - DNA, 19 bp, Artificial Sequence
  Description of Artificial Sequence: Synthetic oligonucleotide
gaagtggcgggtgaggaag

SEQ ID NO: 6426 - DNA, 19 bp, Artificial Sequence
  Description of Artificial Sequence: Synthetic oligonucleotide
tgaagtggcgggtgaggaa

SEQ ID NO: 6427 - DNA, 19 bp, Artificial Sequence
  Description of Artificial Sequence: Synthetic oligonucleotide
atgaagtggcgggtgagga

SEQ ID NO: 6428 - DNA, 19 bp, Artificial Sequence
  Description of Artificial Sequence: Synthetic oligonucleotide
gatgaagtggcgggtgagg

SEQ ID NO: 6429 - DNA, 19 bp, Artificial Sequence
  Description of Artificial Sequence: Synthetic oligonucleotide
agatgaagtggcgggtgag

SEQ ID NO: 6430 - DNA, 19 bp, Artificial Sequence
  Description of Artificial Sequence: Synthetic oligonucleotide
aagatgaagtggcgggtga

SEQ ID NO: 6431 - DNA, 19 bp, Artificial Sequence
  Description of Artificial Sequence: Synthetic oligonucleotide
gaagatgaagtggcgggtg

SEQ ID NO: 6432 - DNA, 19 bp, Artificial Sequence
  Description of Artificial Sequence: Synthetic oligonucleotide
ggaagatgaagtggcgggt

SEQ ID NO: 6433 - DNA, 19 bp, Artificial Sequence
  Description of Artificial Sequence: Synthetic oligonucleotide
tggaagatgaagtggcggg

SEQ ID NO: 6434 - DNA, 19 bp, Artificial Sequence
  Description of Artificial Sequence: Synthetic oligonucleotide
gtggaagatgaagtggcgg

SEQ ID NO: 6435 - DNA, 19 bp, Artificial Sequence
  Description of Artificial Sequence: Synthetic oligonucleotide
cgtggaagatgaagtggcg

SEQ ID NO: 6436 - DNA, 19 bp, Artificial Sequence
  Description of Artificial Sequence: Synthetic oligonucleotide
tcgtggaagatgaagtggc

SEQ ID NO: 6437 - DNA, 19 bp, Artificial Sequence
  Description of Artificial Sequence: Synthetic oligonucleotide
gtcgtggaagatgaagtgg

SEQ ID NO: 6438 - DNA, 19 bp, Artificial Sequence
  Description of Artificial Sequence: Synthetic oligonucleotide
tgtcgtggaagatgaagtg

SEQ ID NO: 6439 - DNA, 19 bp, Artificial Sequence
  Description of Artificial Sequence: Synthetic oligonucleotide
ttgtcgtggaagatgaagt

SEQ ID NO: 6440 - DNA, 19 bp, Artificial Sequence
  Description of Artificial Sequence: Synthetic oligonucleotide
gttgtcgtggaagatgaag

SEQ ID NO: 6441 - DNA, 19 bp, Artificial Sequence
  Description of Artificial Sequence: Synthetic oligonucleotide
tgttgtcgtggaagatgaa

SEQ ID NO: 6442 - DNA, 19 bp, Artificial Sequence
  Description of Artificial Sequence: Synthetic oligonucleotide
ttgttgtcgtggaagatga

SEQ ID NO: 6443 - DNA, 19 bp, Artificial Sequence
  Description of Artificial Sequence: Synthetic oligonucleotide
gttgttgtcgtggaagatg

SEQ ID NO: 6444 - DNA, 19 bp, Artificial Sequence
  Description of Artificial Sequence: Synthetic oligonucleotide
tgttgttgtcgtggaagat

SEQ ID NO: 6445 - DNA, 19 bp, Artificial Sequence
  Description of Artificial Sequence: Synthetic oligonucleotide
ttgttgttgtcgtggaaga

SEQ ID NO: 6446 - DNA, 19 bp, Artificial Sequence
  Description of Artificial Sequence: Synthetic oligonucleotide
gttgttgttgtcgtggaag

SEQ ID NO: 6447 - DNA, 19 bp, Artificial Sequence
  Description of Artificial Sequence: Synthetic oligonucleotide
tgttgttgttgtcgtggaa

SEQ ID NO: 6448 - DNA, 19 bp, Artificial Sequence
  Description of Artificial Sequence: Synthetic oligonucleotide
gtgttgttgttgtcgtgga

SEQ ID NO: 6449 - DNA, 19 bp, Artificial Sequence
  Description of Artificial Sequence: Synthetic oligonucleotide
ggtgttgttgttgtcgtgg

SEQ ID NO: 6450 - DNA, 19 bp, Artificial Sequence
  Description of Artificial Sequence: Synthetic oligonucleotide
aggtgttgttgttgtcgtg

SEQ ID NO: 6451 - DNA, 19 bp, Artificial Sequence
  Description of Artificial Sequence: Synthetic oligonucleotide
caggtgttgttgttgtcgt

SEQ ID NO: 6452 - DNA, 19 bp, Artificial Sequence
  Description of Artificial Sequence: Synthetic oligonucleotide
ccaggtgttgttgttgtcg

SEQ ID NO: 6453 - DNA, 19 bp, Artificial Sequence
  Description of Artificial Sequence: Synthetic oligonucleotide
cccaggtgttgttgttgtc

SEQ ID NO: 6454 - DNA, 19 bp, Artificial Sequence
  Description of Artificial Sequence: Synthetic oligonucleotide
tcccaggtgttgttgttgt

SEQ ID NO: 6455 - DNA, 19 bp, Artificial Sequence
  Description of Artificial Sequence: Synthetic oligonucleotide
ttcccaggtgttgttgttg

SEQ ID NO: 6456 - DNA, 19 bp, Artificial Sequence
  Description of Artificial Sequence: Synthetic oligonucleotide
cttcccaggtgttgttgtt

SEQ ID NO: 6457 - DNA, 19 bp, Artificial Sequence
  Description of Artificial Sequence: Synthetic oligonucleotide
ccttcccaggtgttgttgt

SEQ ID NO: 6458 - DNA, 19 bp, Artificial Sequence
  Description of Artificial Sequence: Synthetic oligonucleotide
cccttcccaggtgttgttg

SEQ ID NO: 6459 - DNA, 19 bp, Artificial Sequence
  Description of Artificial Sequence: Synthetic oligonucleotide
gcccttcccaggtgttgtt

SEQ ID NO: 6460 - DNA, 19 bp, Artificial Sequence
  Description of Artificial Sequence: Synthetic oligonucleotide
tgcccttcccaggtgttgt

SEQ ID NO: 6461 - DNA, 19 bp, Artificial Sequence
  Description of Artificial Sequence: Synthetic oligonucleotide
atgcccttcccaggtgttg

SEQ ID NO: 6462 - DNA, 19 bp, Artificial Sequence
  Description of Artificial Sequence: Synthetic oligonucleotide
aatgcccttcccaggtgtt

SEQ ID NO: 6463 - DNA, 19 bp, Artificial Sequence
  Description of Artificial Sequence: Synthetic oligonucleotide
taatgcccttcccaggtgt

SEQ ID NO: 6464 - DNA, 19 bp, Artificial Sequence
  Description of Artificial Sequence: Synthetic oligonucleotide
gtaatgcccttcccaggtg

SEQ ID NO: 6465 - DNA, 19 bp, Artificial Sequence
  Description of Artificial Sequence: Synthetic oligonucleotide
agtaatgcccttcccaggt

SEQ ID NO: 6466 - DNA, 19 bp, Artificial Sequence
  Description of Artificial Sequence: Synthetic oligonucleotide
tagtaatgcccttcccagg

SEQ ID NO: 6467 - DNA, 19 bp, Artificial Sequence
  Description of Artificial Sequence: Synthetic oligonucleotide
gtagtaatgcccttcccag

SEQ ID NO: 6468 - DNA, 19 bp, Artificial Sequence
  Description of Artificial Sequence: Synthetic oligonucleotide
ggtagtaatgcccttccca

SEQ ID NO: 6469 - DNA, 19 bp, Artificial Sequence
  Description of Artificial Sequence: Synthetic oligonucleotide
tggtagtaatgcccttccc

SEQ ID NO: 6470 - DNA, 19 bp, Artificial Sequence
  Description of Artificial Sequence: Synthetic oligonucleotide
gtggtagtaatgcccttcc

SEQ ID NO: 6471 - DNA, 19 bp, Artificial Sequence
  Description of Artificial Sequence: Synthetic oligonucleotide
agtggtagtaatgcccttc

SEQ ID NO: 6472 - DNA, 19 bp, Artificial Sequence
  Description of Artificial Sequence: Synthetic oligonucleotide
tagtggtagtaatgccctt

SEQ ID NO: 6473 - DNA, 19 bp, Artificial Sequence
  Description of Artificial Sequence: Synthetic oligonucleotide
gtagtggtagtaatgccct

SEQ ID NO: 6474 - DNA, 19 bp, Artificial Sequence
  Description of Artificial Sequence: Synthetic oligonucleotide
agtagtggtagtaatgccc

SEQ ID NO: 6475 - DNA, 19 bp, Artificial Sequence
  Description of Artificial Sequence: Synthetic oligonucleotide
gagtagtggtagtaatgcc

SEQ ID NO: 6476 - DNA, 19 bp, Artificial Sequence
  Description of Artificial Sequence: Synthetic oligonucleotide
tgagtagtggtagtaatgc

SEQ ID NO: 6477 - DNA, 19 bp, Artificial Sequence
  Description of Artificial Sequence: Synthetic oligonucleotide
ctgagtagtggtagtaatg

SEQ ID NO: 6478 - DNA, 19 bp, Artificial Sequence
  Description of Artificial Sequence: Synthetic oligonucleotide
tctgagtagtggtagtaat

SEQ ID NO: 6479 - DNA, 19 bp, Artificial Sequence
  Description of Artificial Sequence: Synthetic oligonucleotide
gtctgagtagtggtagtaa

SEQ ID NO: 6480 - DNA, 19 bp, Artificial Sequence
  Description of Artificial Sequence: Synthetic oligonucleotide
ggtctgagtagtggtagta

SEQ ID NO: 6481 - DNA, 19 bp, Artificial Sequence
  Description of Artificial Sequence: Synthetic oligonucleotide
gggtctgagtagtggtagt

SEQ ID NO: 6482 - DNA, 19 bp, Artificial Sequence
  Description of Artificial Sequence: Synthetic oligonucleotide
agggtctgagtagtggtag

SEQ ID NO: 6483 - DNA, 19 bp, Artificial Sequence
  Description of Artificial Sequence: Synthetic oligonucleotide
cagggtctgagtagtggta

SEQ ID NO: 6484 - DNA, 19 bp, Artificial Sequence
  Description of Artificial Sequence: Synthetic oligonucleotide
acagggtctgagtagtggt

SEQ ID NO: 6485 - DNA, 19 bp, Artificial Sequence
  Description of Artificial Sequence: Synthetic oligonucleotide
gacagggtctgagtagtgg

SEQ ID NO: 6486 - DNA, 19 bp, Artificial Sequence
  Description of Artificial Sequence: Synthetic oligonucleotide
agacagggtctgagtagtg

SEQ ID NO: 6487 - DNA, 19 bp, Artificial Sequence
  Description of Artificial Sequence: Synthetic oligonucleotide
cagacagggtctgagtagt

SEQ ID NO: 6488 - DNA, 19 bp, Artificial Sequence
  Description of Artificial Sequence: Synthetic oligonucleotide
gcagacagggtctgagtag

SEQ ID NO: 6489 - DNA, 19 bp, Artificial Sequence
  Description of Artificial Sequence: Synthetic oligonucleotide
tgcagacagggtctgagta

SEQ ID NO: 6490 - DNA, 19 bp, Artificial Sequence
  Description of Artificial Sequence: Synthetic oligonucleotide
ttgcagacagggtctgagt

SEQ ID NO: 6491 - DNA, 19 bp, Artificial Sequence
  Description of Artificial Sequence: Synthetic oligonucleotide
cttgcagacagggtctgag

SEQ ID NO: 6492 - DNA, 19 bp, Artificial Sequence
  Description of Artificial Sequence: Synthetic oligonucleotide
gcttgcagacagggtctga

SEQ ID NO: 6493 - DNA, 19 bp, Artificial Sequence
  Description of Artificial Sequence: Synthetic oligonucleotide
tgcttgcagacagggtctg

SEQ ID NO: 6494 - DNA, 19 bp, Artificial Sequence
  Description of Artificial Sequence: Synthetic oligonucleotide
gtgcttgcagacagggtct

SEQ ID NO: 6495 - DNA, 19 bp, Artificial Sequence
  Description of Artificial Sequence: Synthetic oligonucleotide
ggtgcttgcagacagggtc

SEQ ID NO: 6496 - DNA, 19 bp, Artificial Sequence
  Description of Artificial Sequence: Synthetic oligonucleotide
gggtgcttgcagacagggt

SEQ ID NO: 6497 - DNA, 19 bp, Artificial Sequence
  Description of Artificial Sequence: Synthetic oligonucleotide
ggggtgcttgcagacaggg

SEQ ID NO: 6498 - DNA, 19 bp, Artificial Sequence
  Description of Artificial Sequence: Synthetic oligonucleotide
tggggtgcttgcagacagg

SEQ ID NO: 6499 - DNA, 19 bp, Artificial Sequence
  Description of Artificial Sequence: Synthetic oligonucleotide
gtggggtgcttgcagacag

SEQ ID NO: 6500 - DNA, 19 bp, Artificial Sequence
  Description of Artificial Sequence: Synthetic oligonucleotide
tgtggggtgcttgcagaca

SEQ ID NO: 6501 - DNA, 19 bp, Artificial Sequence
  Description of Artificial Sequence: Synthetic oligonucleotide
atgtggggtgcttgcagac

SEQ ID NO: 6502 - DNA, 19 bp, Artificial Sequence
  Description of Artificial Sequence: Synthetic oligonucleotide
aatgtggggtgcttgcaga

SEQ ID NO: 6503 - DNA, 19 bp, Artificial Sequence
  Description of Artificial Sequence: Synthetic oligonucleotide
gaatgtggggtgcttgcag

SEQ ID NO: 6504 - DNA, 19 bp, Artificial Sequence
  Description of Artificial Sequence: Synthetic oligonucleotide
tgaatgtggggtgcttgca

SEQ ID NO: 6505 - DNA, 19 bp, Artificial Sequence
  Description of Artificial Sequence: Synthetic oligonucleotide
gtgaatgtggggtgcttgc

SEQ ID NO: 6506 - DNA, 19 bp, Artificial Sequence
  Description of Artificial Sequence: Synthetic oligonucleotide
ggtgaatgtggggtgcttg

SEQ ID NO: 6507 - DNA, 19 bp, Artificial Sequence
  Description of Artificial Sequence: Synthetic oligonucleotide
tggtgaatgtggggtgctt

SEQ ID NO: 6508 - DNA, 19 bp, Artificial Sequence
  Description of Artificial Sequence: Synthetic oligonucleotide
atggtgaatgtggggtgct

SEQ ID NO: 6509 - DNA, 19 bp, Artificial Sequence
  Description of Artificial Sequence: Synthetic oligonucleotide
gatggtgaatgtggggtgc

SEQ ID NO: 6510 - DNA, 19 bp, Artificial Sequence
  Description of Artificial Sequence: Synthetic oligonucleotide
agatggtgaatgtggggtg

SEQ ID NO: 6511 - DNA, 19 bp, Artificial Sequence
  Description of Artificial Sequence: Synthetic oligonucleotide
tagatggtgaatgtggggt

SEQ ID NO: 6512 - DNA, 19 bp, Artificial Sequence
  Description of Artificial Sequence: Synthetic oligonucleotide
gtagatggtgaatgtgggg

SEQ ID NO: 6513 - DNA, 19 bp, Artificial Sequence
  Description of Artificial Sequence: Synthetic oligonucleotide
cgtagatggtgaatgtggg

SEQ ID NO: 6514 - DNA, 19 bp, Artificial Sequence
  Description of Artificial Sequence: Synthetic oligonucleotide
gcgtagatggtgaatgtgg

SEQ ID NO: 6515 - DNA, 19 bp, Artificial Sequence
  Description of Artificial Sequence: Synthetic oligonucleotide
agcgtagatggtgaatgtg

SEQ ID NO: 6516 - DNA, 19 bp, Artificial Sequence
  Description of Artificial Sequence: Synthetic oligonucleotide
gagcgtagatggtgaatgt

SEQ ID NO: 6517 - DNA, 19 bp, Artificial Sequence
  Description of Artificial Sequence: Synthetic oligonucleotide
cgagcgtagatggtgaatg

SEQ ID NO: 6518 - DNA, 19 bp, Artificial Sequence
  Description of Artificial Sequence: Synthetic oligonucleotide
tcgagcgtagatggtgaat

SEQ ID NO: 6519 - DNA, 19 bp, Artificial Sequence
  Description of Artificial Sequence: Synthetic oligonucleotide
ctcgagcgtagatggtgaa

SEQ ID NO: 6520 - DNA, 19 bp, Artificial Sequence
  Description of Artificial Sequence: Synthetic oligonucleotide
cctcgagcgtagatggtga

SEQ ID NO: 6521 - DNA, 19 bp, Artificial Sequence
  Description of Artificial Sequence: Synthetic oligonucleotide
gcctcgagcgtagatggtg

SEQ ID NO: 6522 - DNA, 19 bp, Artificial Sequence
  Description of Artificial Sequence: Synthetic oligonucleotide
ggcctcgagcgtagatggt

SEQ ID NO: 6523 - DNA, 19 bp, Artificial Sequence
  Description of Artificial Sequence: Synthetic oligonucleotide
cggcctcgagcgtagatgg

SEQ ID NO: 6524 - DNA, 19 bp, Artificial Sequence
  Description of Artificial Sequence: Synthetic oligonucleotide
gcggcctcgagcgtagatg

SEQ ID NO: 6525 - DNA, 19 bp, Artificial Sequence
  Description of Artificial Sequence: Synthetic oligonucleotide
agcggcctcgagcgtagat

SEQ ID NO: 6526 - DNA, 19 bp, Artificial Sequence
  Description of Artificial Sequence: Synthetic oligonucleotide
tagcggcctcgagcgtaga

SEQ ID NO: 6527 - DNA, 19 bp, Artificial Sequence
  Description of Artificial Sequence: Synthetic oligonucleotide
gtagcggcctcgagcgtag

SEQ ID NO: 6528 - DNA, 19 bp, Artificial Sequence
  Description of Artificial Sequence: Synthetic oligonucleotide
tgtagcggcctcgagcgta

SEQ ID NO: 6529 - DNA, 19 bp, Artificial Sequence
  Description of Artificial Sequence: Synthetic oligonucleotide
ctgtagcggcctcgagcgt

SEQ ID NO: 6530 - DNA, 19 bp, Artificial Sequence
  Description of Artificial Sequence: Synthetic oligonucleotide
gctgtagcggcctcgagcg

SEQ ID NO: 6531 - DNA, 19 bp, Artificial Sequence
  Description of Artificial Sequence: Synthetic oligonucleotide
ggctgtagcggcctcgagc

SEQ ID NO: 6532 - DNA, 19 bp, Artificial Sequence
  Description of Artificial Sequence: Synthetic oligonucleotide
cggctgtagcggcctcgag

SEQ ID NO: 6533 - DNA, 19 bp, Artificial Sequence
  Description of Artificial Sequence: Synthetic oligonucleotide
gcggctgtagcggcctcga

SEQ ID NO: 6534 - DNA, 19 bp, Artificial Sequence
  Description of Artificial Sequence: Synthetic oligonucleotide
cgcggctgtagcggcctcg

SEQ ID NO: 6535 - DNA, 19 bp, Artificial Sequence
  Description of Artificial Sequence: Synthetic oligonucleotide
ccgcggctgtagcggcctc

SEQ ID NO: 6536 - DNA, 19 bp, Artificial Sequence
  Description of Artificial Sequence: Synthetic oligonucleotide
accgcggctgtagcggcct

SEQ ID NO: 6537 - DNA, 19 bp, Artificial Sequence
  Description of Artificial Sequence: Synthetic oligonucleotide
caccgcggctgtagcggcc

SEQ ID NO: 6538 - DNA, 19 bp, Artificial Sequence
  Description of Artificial Sequence: Synthetic oligonucleotide
acaccgcggctgtagcggc

SEQ ID NO: 6539 - DNA, 19 bp, Artificial Sequence
  Description of Artificial Sequence: Synthetic oligonucleotide
cacaccgcggctgtagcgg

SEQ ID NO: 6540 - DNA, 19 bp, Artificial Sequence
  Description of Artificial Sequence: Synthetic oligonucleotide
gcacaccgcggctgtagcg

SEQ ID NO: 6541 - DNA, 19 bp, Artificial Sequence
  Description of Artificial Sequence: Synthetic oligonucleotide
agcacaccgcggctgtagc

SEQ ID NO: 6542 - DNA, 19 bp, Artificial Sequence
  Description of Artificial Sequence: Synthetic oligonucleotide
gagcacaccgcggctgtag

SEQ ID NO: 6543 - DNA, 19 bp, Artificial Sequence
  Description of Artificial Sequence: Synthetic oligonucleotide
agagcacaccgcggctgta

SEQ ID NO: 6544 - DNA, 19 bp, Artificial Sequence
  Description of Artificial Sequence: Synthetic oligonucleotide
gagagcacaccgcggctgt

SEQ ID NO: 6545 - DNA, 19 bp, Artificial Sequence
  Description of Artificial Sequence: Synthetic oligonucleotide
tgagagcacaccgcggctg

SEQ ID NO: 6546 - DNA, 19 bp, Artificial Sequence
  Description of Artificial Sequence: Synthetic oligonucleotide
atgagagcacaccgcggct

SEQ ID NO: 6547 - DNA, 19 bp, Artificial Sequence
  Description of Artificial Sequence: Synthetic oligonucleotide
gatgagagcacaccgcggc

SEQ ID NO: 6548 - DNA, 19 bp, Artificial Sequence
  Description of Artificial Sequence: Synthetic oligonucleotide
agatgagagcacaccgcgg

SEQ ID NO: 6549 - DNA, 19 bp, Artificial Sequence
  Description of Artificial Sequence: Synthetic oligonucleotide
tagatgagagcacaccgcg

SEQ ID NO: 6550 - DNA, 19 bp, Artificial Sequence
  Description of Artificial Sequence: Synthetic oligonucleotide
ttagatgagagcacaccgc

SEQ ID NO: 6551 - DNA, 19 bp, Artificial Sequence
  Description of Artificial Sequence: Synthetic oligonucleotide
cttagatgagagcacaccg

SEQ ID NO: 6552 - DNA, 19 bp, Artificial Sequence
  Description of Artificial Sequence: Synthetic oligonucleotide
ccttagatgagagcacacc

SEQ ID NO: 6553 - DNA, 19 bp, Artificial Sequence
  Description of Artificial Sequence: Synthetic oligonucleotide
accttagatgagagcacac

SEQ ID NO: 6554 - DNA, 19 bp, Artificial Sequence
  Description of Artificial Sequence: Synthetic oligonucleotide
gaccttagatgagagcaca

SEQ ID NO: 6555 - DNA, 19 bp, Artificial Sequence
  Description of Artificial Sequence: Synthetic oligonucleotide
tgaccttagatgagagcac

SEQ ID NO: 6556 - DNA, 19 bp, Artificial Sequence
  Description of Artificial Sequence: Synthetic oligonucleotide
atgaccttagatgagagca

SEQ ID NO: 6557 - DNA, 19 bp, Artificial Sequence
  Description of Artificial Sequence: Synthetic oligonucleotide
catgaccttagatgagagc

SEQ ID NO: 6558 - DNA, 19 bp, Artificial Sequence
  Description of Artificial Sequence: Synthetic oligonucleotide
ccatgaccttagatgagag

SEQ ID NO: 6559 - DNA, 19 bp, Artificial Sequence
  Description of Artificial Sequence: Synthetic oligonucleotide
tctcatctaaggtcatggg

SEQ ID NO: 6560 - DNA, 19 bp, Artificial Sequence
  Description of Artificial Sequence: Synthetic oligonucleotide
ctcatctaaggtcatgggt

SEQ ID NO: 6561 - DNA, 19 bp, Artificial Sequence
  Description of Artificial Sequence: Synthetic oligonucleotide
tcatctaaggtcatgggtg

SEQ ID NO: 6562 - DNA, 19 bp, Artificial Sequence
  Description of Artificial Sequence: Synthetic oligonucleotide
catctaaggtcatgggtgg

SEQ ID NO: 6563 - DNA, 19 bp, Artificial Sequence
  Description of Artificial Sequence: Synthetic oligonucleotide
atctaaggtcatgggtggc

SEQ ID NO: 6564 - DNA, 19 bp, Artificial Sequence
  Description of Artificial Sequence: Synthetic oligonucleotide
tctaaggtcatgggtggca

SEQ ID NO: 6565 - DNA, 19 bp, Artificial Sequence
  Description of Artificial Sequence: Synthetic oligonucleotide
ctaaggtcatgggtggcac

SEQ ID NO: 6566 - DNA, 19 bp, Artificial Sequence
  Description of Artificial Sequence: Synthetic oligonucleotide
taaggtcatgggtggcacg

SEQ ID NO: 6567 - DNA, 19 bp, Artificial Sequence
  Description of Artificial Sequence: Synthetic oligonucleotide
aaggtcatgggtggcacgg

SEQ ID NO: 6568 - DNA, 19 bp, Artificial Sequence
  Description of Artificial Sequence: Synthetic oligonucleotide
aggtcatgggtggcacgga

SEQ ID NO: 6569 - DNA, 19 bp, Artificial Sequence
  Description of Artificial Sequence: Synthetic oligonucleotide
ggtcatgggtggcacggag

SEQ ID NO: 6570 - DNA, 19 bp, Artificial Sequence
  Description of Artificial Sequence: Synthetic oligonucleotide
gtcatgggtggcacggagt

SEQ ID NO: 6571 - DNA, 19 bp, Artificial Sequence
  Description of Artificial Sequence: Synthetic oligonucleotide
tcatgggtggcacggagtt

SEQ ID NO: 6572 - DNA, 19 bp, Artificial Sequence
  Description of Artificial Sequence: Synthetic oligonucleotide
catgggtggcacggagttt

SEQ ID NO: 6573 - DNA, 19 bp, Artificial Sequence
  Description of Artificial Sequence: Synthetic oligonucleotide
atgggtggcacggagtttg

SEQ ID NO: 6574 - DNA, 19 bp, Artificial Sequence
  Description of Artificial Sequence: Synthetic oligonucleotide
tgggtggcacggagtttgt

SEQ ID NO: 6575 - DNA, 19 bp, Artificial Sequence
  Description of Artificial Sequence: Synthetic oligonucleotide
gggtggcacggagtttgtg

SEQ ID NO: 6576 - DNA, 19 bp, Artificial Sequence
  Description of Artificial Sequence: Synthetic oligonucleotide
ggtggcacggagtttgtgt

SEQ ID NO: 6577 - DNA, 19 bp, Artificial Sequence
  Description of Artificial Sequence: Synthetic oligonucleotide
gtggcacggagtttgtgtt

SEQ ID NO: 6578 - DNA, 19 bp, Artificial Sequence
  Description of Artificial Sequence: Synthetic oligonucleotide
tggcacggagtttgtgttc

SEQ ID NO: 6579 - DNA, 19 bp, Artificial Sequence
  Description of Artificial Sequence: Synthetic oligonucleotide
ggcacggagtttgtgttca

SEQ ID NO: 6580 - DNA, 19 bp, Artificial Sequence
  Description of Artificial Sequence: Synthetic oligonucleotide
gcacggagtttgtgttcaa

SEQ ID NO: 6581 - DNA, 19 bp, Artificial Sequence
  Description of Artificial Sequence: Synthetic oligonucleotide
cacggagtttgtgttcaaa

SEQ ID NO: 6582 - DNA, 19 bp, Artificial Sequence
  Description of Artificial Sequence: Synthetic oligonucleotide
acggagtttgtgttcaaag

SEQ ID NO: 6583 - DNA, 19 bp, Artificial Sequence
  Description of Artificial Sequence: Synthetic oligonucleotide
cggagtttgtgttcaaagt

SEQ ID NO: 6584 - DNA, 19 bp, Artificial Sequence
  Description of Artificial Sequence: Synthetic oligonucleotide
ggagtttgtgttcaaagtg

SEQ ID NO: 6585 - DNA, 19 bp, Artificial Sequence
  Description of Artificial Sequence: Synthetic oligonucleotide
gagtttgtgttcaaagtga

SEQ ID NO: 6586 - DNA, 19 bp, Artificial Sequence
  Description of Artificial Sequence: Synthetic oligonucleotide
agtttgtgttcaaagtgaa

SEQ ID NO: 6587 - DNA, 19 bp, Artificial Sequence
  Description of Artificial Sequence: Synthetic oligonucleotide
gtttgtgttcaaagtgaat

SEQ ID NO: 6588 - DNA, 19 bp, Artificial Sequence
  Description of Artificial Sequence: Synthetic oligonucleotide
tttgtgttcaaagtgaatc

SEQ ID NO: 6589 - DNA, 19 bp, Artificial Sequence
  Description of Artificial Sequence: Synthetic oligonucleotide
ttgtgttcaaagtgaatca

SEQ ID NO: 6590 - DNA, 19 bp, Artificial Sequence
  Description of Artificial Sequence: Synthetic oligonucleotide
tgtgttcaaagtgaatcac

SEQ ID NO: 6591 - DNA, 19 bp, Artificial Sequence
  Description of Artificial Sequence: Synthetic oligonucleotide
gtgttcaaagtgaatcaca

SEQ ID NO: 6592 - DNA, 19 bp, Artificial Sequence
  Description of Artificial Sequence: Synthetic oligonucleotide
tgttcaaagtgaatcacat

SEQ ID NO: 6593 - DNA, 19 bp, Artificial Sequence
  Description of Artificial Sequence: Synthetic oligonucleotide
gttcaaagtgaatcacatg

SEQ ID NO: 6594 - DNA, 19 bp, Artificial Sequence
  Description of Artificial Sequence: Synthetic oligonucleotide
ttcaaagtgaatcacatga

SEQ ID NO: 6595 - DNA, 19 bp, Artificial Sequence
  Description of Artificial Sequence: Synthetic oligonucleotide
tcaaagtgaatcacatgaa

SEQ ID NO: 6596 - DNA, 19 bp, Artificial Sequence
  Description of Artificial Sequence: Synthetic oligonucleotide
caaagtgaatcacatgaag

SEQ ID NO: 6597 - DNA, 19 bp, Artificial Sequence
  Description of Artificial Sequence: Synthetic oligonucleotide
aaagtgaatcacatgaagg

SEQ ID NO: 6598 - DNA, 19 bp, Artificial Sequence
  Description of Artificial Sequence: Synthetic oligonucleotide
aagtgaatcacatgaaggt

SEQ ID NO: 6599 - DNA, 19 bp, Artificial Sequence
  Description of Artificial Sequence: Synthetic oligonucleotide
agtgaatcacatgaaggtt

SEQ ID NO: 6600 - DNA, 19 bp, Artificial Sequence
  Description of Artificial Sequence: Synthetic oligonucleotide
gtgaatcacatgaaggtta

SEQ ID NO: 6601 - DNA, 19 bp, Artificial Sequence
  Description of Artificial Sequence: Synthetic oligonucleotide
tgaatcacatgaaggttac

SEQ ID NO: 6602 - DNA, 19 bp, Artificial Sequence
  Description of Artificial Sequence: Synthetic oligonucleotide
gaatcacatgaaggttact

SEQ ID NO: 6603 - DNA, 19 bp, Artificial Sequence
  Description of Artificial Sequence: Synthetic oligonucleotide
aatcacatgaaggttactc

SEQ ID NO: 6604 - DNA, 19 bp, Artificial Sequence
  Description of Artificial Sequence: Synthetic oligonucleotide
atcacatgaaggttactcc

SEQ ID NO: 6605 - DNA, 19 bp, Artificial Sequence
  Description of Artificial Sequence: Synthetic oligonucleotide
tcacatgaaggttactccc

SEQ ID NO: 6606 - DNA, 19 bp, Artificial Sequence
  Description of Artificial Sequence: Synthetic oligonucleotide
cacatgaaggttactccca

SEQ ID NO: 6607 - DNA, 19 bp, Artificial Sequence
  Description of Artificial Sequence: Synthetic oligonucleotide
acatgaaggttactcccat

SEQ ID NO: 6608 - DNA, 19 bp, Artificial Sequence
  Description of Artificial Sequence: Synthetic oligonucleotide
catgaaggttactcccatg

SEQ ID NO: 6609 - DNA, 19 bp, Artificial Sequence
  Description of Artificial Sequence: Synthetic oligonucleotide
atgaaggttactcccatgg

SEQ ID NO: 6610 - DNA, 19 bp, Artificial Sequence
  Description of Artificial Sequence: Synthetic oligonucleotide
tgaaggttactcccatgga

SEQ ID NO: 6611 - DNA, 19 bp, Artificial Sequence
  Description of Artificial Sequence: Synthetic oligonucleotide
gaaggttactcccatggac

SEQ ID NO: 6612 - DNA, 19 bp, Artificial Sequence
  Description of Artificial Sequence: Synthetic oligonucleotide
aaggttactcccatggacg

SEQ ID NO: 6613 - DNA, 19 bp, Artificial Sequence
  Description of Artificial Sequence: Synthetic oligonucleotide
aggttactcccatggacgc

SEQ ID NO: 6614 - DNA, 19 bp, Artificial Sequence
  Description of Artificial Sequence: Synthetic oligonucleotide
ggttactcccatggacgca

SEQ ID NO: 6615 - DNA, 19 bp, Artificial Sequence
  Description of Artificial Sequence: Synthetic oligonucleotide
gttactcccatggacgcag

SEQ ID NO: 6616 - DNA, 19 bp, Artificial Sequence
  Description of Artificial Sequence: Synthetic oligonucleotide
ttactcccatggacgcagc

SEQ ID NO: 6617 - DNA, 19 bp, Artificial Sequence
  Description of Artificial Sequence: Synthetic oligonucleotide
tactcccatggacgcagcc

SEQ ID NO: 6618 - DNA, 19 bp, Artificial Sequence
  Description of Artificial Sequence: Synthetic oligonucleotide
actcccatggacgcagcca

SEQ ID NO: 6619 - DNA, 19 bp, Artificial Sequence
  Description of Artificial Sequence: Synthetic oligonucleotide
ctcccatggacgcagccac

SEQ ID NO: 6620 - DNA, 19 bp, Artificial Sequence
  Description of Artificial Sequence: Synthetic oligonucleotide
tcccatggacgcagccaca

SEQ ID NO: 6621 - DNA, 19 bp, Artificial Sequence
  Description of Artificial Sequence: Synthetic oligonucleotide
cccatggacgcagccacag

SEQ ID NO: 6622 - DNA, 19 bp, Artificial Sequence
  Description of Artificial Sequence: Synthetic oligonucleotide
ccatggacgcagccacagc

SEQ ID NO: 6623 - DNA, 19 bp, Artificial Sequence
  Description of Artificial Sequence: Synthetic oligonucleotide
catggacgcagccacagcc

SEQ ID NO: 6624 - DNA, 19 bp, Artificial Sequence
  Description of Artificial Sequence: Synthetic oligonucleotide
atggacgcagccacagcct

SEQ ID NO: 6625 - DNA, 19 bp, Artificial Sequence
  Description of Artificial Sequence: Synthetic oligonucleotide
tggacgcagccacagcctc

SEQ ID NO: 6626 - DNA, 19 bp, Artificial Sequence
  Description of Artificial Sequence: Synthetic oligonucleotide
ggacgcagccacagcctcc

SEQ ID NO: 6627 - DNA, 19 bp, Artificial Sequence
  Description of Artificial Sequence: Synthetic oligonucleotide
gacgcagccacagcctccc

SEQ ID NO: 6628 - DNA, 19 bp, Artificial Sequence
  Description of Artificial Sequence: Synthetic oligonucleotide
acgcagccacagcctccct

SEQ ID NO: 6629 - DNA, 19 bp, Artificial Sequence
  Description of Artificial Sequence: Synthetic oligonucleotide
cgcagccacagcctccctc

SEQ ID NO: 6630 - DNA, 19 bp, Artificial Sequence
  Description of Artificial Sequence: Synthetic oligonucleotide
gcagccacagcctccctcc

SEQ ID NO: 6631 - DNA, 19 bp, Artificial Sequence
  Description of Artificial Sequence: Synthetic oligonucleotide
cagccacagcctccctcct

SEQ ID NO: 6632 - DNA, 19 bp, Artificial Sequence
  Description of Artificial Sequence: Synthetic oligonucleotide
agccacagcctccctcctc

SEQ ID NO: 6633 - DNA, 19 bp, Artificial Sequence
  Description of Artificial Sequence: Synthetic oligonucleotide
gccacagcctccctcctca

SEQ ID NO: 6634 - DNA, 19 bp, Artificial Sequence
  Description of Artificial Sequence: Synthetic oligonucleotide
ccacagcctccctcctcaa

SEQ ID NO: 6635 - DNA, 19 bp, Artificial Sequence
  Description of Artificial Sequence: Synthetic oligonucleotide
cacagcctccctcctcaat

SEQ ID NO: 6636 - DNA, 19 bp, Artificial Sequence
  Description of Artificial Sequence: Synthetic oligonucleotide
acagcctccctcctcaatg

SEQ ID NO: 6637 - DNA, 19 bp, Artificial Sequence
  Description of Artificial Sequence: Synthetic oligonucleotide
cagcctccctcctcaatgt

SEQ ID NO: 6638 - DNA, 19 bp, Artificial Sequence
  Description of Artificial Sequence: Synthetic oligonucleotide
agcctccctcctcaatgtc

SEQ ID NO: 6639 - DNA, 19 bp, Artificial Sequence
  Description of Artificial Sequence: Synthetic oligonucleotide
gcctccctcctcaatgtct

SEQ ID NO: 6640 - DNA, 19 bp, Artificial Sequence
  Description of Artificial Sequence: Synthetic oligonucleotide
cctccctcctcaatgtctt

SEQ ID NO: 6641 - DNA, 19 bp, Artificial Sequence
  Description of Artificial Sequence: Synthetic oligonucleotide
ctccctcctcaatgtcttc

SEQ ID NO: 6642 - DNA, 19 bp, Artificial Sequence
  Description of Artificial Sequence: Synthetic oligonucleotide
tccctcctcaatgtcttca

SEQ ID NO: 6643 - DNA, 19 bp, Artificial Sequence
  Description of Artificial Sequence: Synthetic oligonucleotide
ccctcctcaatgtcttcag

SEQ ID NO: 6644 - DNA, 19 bp, Artificial Sequence
  Description of Artificial Sequence: Synthetic oligonucleotide
cctcctcaatgtcttcagt

SEQ ID NO: 6645 - DNA, 19 bp, Artificial Sequence
  Description of Artificial Sequence: Synthetic oligonucleotide
ctcctcaatgtcttcagtg

SEQ ID NO: 6646 - DNA, 19 bp, Artificial Sequence
  Description of Artificial Sequence: Synthetic oligonucleotide
tcctcaatgtcttcagtgg

SEQ ID NO: 6647 - DNA, 19 bp, Artificial Sequence
  Description of Artificial Sequence: Synthetic oligonucleotide
cctcaatgtcttcagtggg

SEQ ID NO: 6648 - DNA, 19 bp, Artificial Sequence
  Description of Artificial Sequence: Synthetic oligonucleotide
ctcaatgtcttcagtggga

SEQ ID NO: 6649 - DNA, 19 bp, Artificial Sequence
  Description of Artificial Sequence: Synthetic oligonucleotide
tcaatgtcttcagtgggaa

SEQ ID NO: 6650 - DNA, 19 bp, Artificial Sequence
  Description of Artificial Sequence: Synthetic oligonucleotide
caatgtcttcagtgggaat

SEQ ID NO: 6651 - DNA, 19 bp, Artificial Sequence
  Description of Artificial Sequence: Synthetic oligonucleotide
aatgtcttcagtgggaatg

SEQ ID NO: 6652 - DNA, 19 bp, Artificial Sequence
  Description of Artificial Sequence: Synthetic oligonucleotide
atgtcttcagtgggaatga

SEQ ID NO: 6653 - DNA, 19 bp, Artificial Sequence
  Description of Artificial Sequence: Synthetic oligonucleotide
tgtcttcagtgggaatgag

SEQ ID NO: 6654 - DNA, 19 bp, Artificial Sequence
  Description of Artificial Sequence: Synthetic oligonucleotide
gtcttcagtgggaatgagt

SEQ ID NO: 6655 - DNA, 19 bp, Artificial Sequence
  Description of Artificial Sequence: Synthetic oligonucleotide
tcttcagtgggaatgagtg

SEQ ID NO: 6656 - DNA, 19 bp, Artificial Sequence
  Description of Artificial Sequence: Synthetic oligonucleotide
cttcagtgggaatgagtgt

SEQ ID NO: 6657 - DNA, 19 bp, Artificial Sequence
  Description of Artificial Sequence: Synthetic oligonucleotide
ttcagtgggaatgagtgtg

SEQ ID NO: 6658 - DNA, 19 bp, Artificial Sequence
  Description of Artificial Sequence: Synthetic oligonucleotide
tcagtgggaatgagtgtgg

SEQ ID NO: 6659 - DNA, 19 bp, Artificial Sequence
  Description of Artificial Sequence: Synthetic oligonucleotide
cagtgggaatgagtgtggg

SEQ ID NO: 6660 - DNA, 19 bp, Artificial Sequence
  Description of Artificial Sequence: Synthetic oligonucleotide
agtgggaatgagtgtgggg

SEQ ID NO: 6661 - DNA, 19 bp, Artificial Sequence
  Description of Artificial Sequence: Synthetic oligonucleotide
gtgggaatgagtgtggggc

SEQ ID NO: 6662 - DNA, 19 bp, Artificial Sequence
  Description of Artificial Sequence: Synthetic oligonucleotide
tgggaatgagtgtggggct

SEQ ID NO: 6663 - DNA, 19 bp, Artificial Sequence
  Description of Artificial Sequence: Synthetic oligonucleotide
gggaatgagtgtggggctg

SEQ ID NO: 6664 - DNA, 19 bp, Artificial Sequence
  Description of Artificial Sequence: Synthetic oligonucleotide
ggaatgagtgtggggctga

SEQ ID NO: 6665 - DNA, 19 bp, Artificial Sequence
  Description of Artificial Sequence: Synthetic oligonucleotide
gaatgagtgtggggctgag

SEQ ID NO: 6666 - DNA, 19 bp, Artificial Sequence
  Description of Artificial Sequence: Synthetic oligonucleotide
aatgagtgtggggctgagg

SEQ ID NO: 6667 - DNA, 19 bp, Artificial Sequence
  Description of Artificial Sequence: Synthetic oligonucleotide
atgagtgtggggctgaggg

SEQ ID NO: 6668 - DNA, 19 bp, Artificial Sequence
  Description of Artificial Sequence: Synthetic oligonucleotide
tgagtgtggggctgagggc

SEQ ID NO: 6669 - DNA, 19 bp, Artificial Sequence
  Description of Artificial Sequence: Synthetic oligonucleotide
gagtgtggggctgagggct

SEQ ID NO: 6670 - DNA, 19 bp, Artificial Sequence
  Description of Artificial Sequence: Synthetic oligonucleotide
agtgtggggctgagggctc

SEQ ID NO: 6671 - DNA, 19 bp, Artificial Sequence
  Description of Artificial Sequence: Synthetic oligonucleotide
gtgtggggctgagggctcc

SEQ ID NO: 6672 - DNA, 19 bp, Artificial Sequence
  Description of Artificial Sequence: Synthetic oligonucleotide
tgtggggctgagggctcct

SEQ ID NO: 6673 - DNA, 19 bp, Artificial Sequence
  Description of Artificial Sequence: Synthetic oligonucleotide
gtggggctgagggctcctg

SEQ ID NO: 6674 - DNA, 19 bp, Artificial Sequence
  Description of Artificial Sequence: Synthetic oligonucleotide
tggggctgagggctcctgg

SEQ ID NO: 6675 - DNA, 19 bp, Artificial Sequence
  Description of Artificial Sequence: Synthetic oligonucleotide
ggggctgagggctcctggc

SEQ ID NO: 6676 - DNA, 19 bp, Artificial Sequence
  Description of Artificial Sequence: Synthetic oligonucleotide
gggctgagggctcctggca

SEQ ID NO: 6677 - DNA, 19 bp, Artificial Sequence
  Description of Artificial Sequence: Synthetic oligonucleotide
ggctgagggctcctggcag

SEQ ID NO: 6678 - DNA, 19 bp, Artificial Sequence
  Description of Artificial Sequence: Synthetic oligonucleotide
gctgagggctcctggcagg

SEQ ID NO: 6679 - DNA, 19 bp, Artificial Sequence
  Description of Artificial Sequence: Synthetic oligonucleotide
ctgagggctcctggcaggt

SEQ ID NO: 6680 - DNA, 19 bp, Artificial Sequence
  Description of Artificial Sequence: Synthetic oligonucleotide
tgagggctcctggcaggtg

SEQ ID NO: 6681 - DNA, 19 bp, Artificial Sequence
  Description of Artificial Sequence: Synthetic oligonucleotide
gagggctcctggcaggtgg

SEQ ID NO: 6682 - DNA, 19 bp, Artificial Sequence
  Description of Artificial Sequence: Synthetic oligonucleotide
agggctcctggcaggtggg

SEQ ID NO: 6683 - DNA, 19 bp, Artificial Sequence
  Description of Artificial Sequence: Synthetic oligonucleotide
gggctcctggcaggtgggt

SEQ ID NO: 6684 - DNA, 19 bp, Artificial Sequence
  Description of Artificial Sequence: Synthetic oligonucleotide
ggctcctggcaggtgggta

SEQ ID NO: 6685 - DNA, 19 bp, Artificial Sequence
  Description of Artificial Sequence: Synthetic oligonucleotide
gctcctggcaggtgggtat

SEQ ID NO: 6686 - DNA, 19 bp, Artificial Sequence
  Description of Artificial Sequence: Synthetic oligonucleotide
ctcctggcaggtgggtatc

SEQ ID NO: 6687 - DNA, 19 bp, Artificial Sequence
  Description of Artificial Sequence: Synthetic oligonucleotide
tcctggcaggtgggtatcc

SEQ ID NO: 6688 - DNA, 19 bp, Artificial Sequence
  Description of Artificial Sequence: Synthetic oligonucleotide
cctggcaggtgggtatcca

SEQ ID NO: 6689 - DNA, 19 bp, Artificial Sequence
  Description of Artificial Sequence: Synthetic oligonucleotide
ctggcaggtgggtatccaa

SEQ ID NO: 6690 - DNA, 19 bp, Artificial Sequence
  Description of Artificial Sequence: Synthetic oligonucleotide
tggcaggtgggtatccaac

SEQ ID NO: 6691 - DNA, 19 bp, Artificial Sequence
  Description of Artificial Sequence: Synthetic oligonucleotide
ggcaggtgggtatccaaca

SEQ ID NO: 6692 - DNA, 19 bp, Artificial Sequence
  Description of Artificial Sequence: Synthetic oligonucleotide
gcaggtgggtatccaacag

SEQ ID NO: 6693 - DNA, 19 bp, Artificial Sequence
  Description of Artificial Sequence: Synthetic oligonucleotide
caggtgggtatccaacagg

SEQ ID NO: 6694 - DNA, 19 bp, Artificial Sequence
  Description of Artificial Sequence: Synthetic oligonucleotide
aggtgggtatccaacagga

SEQ ID NO: 6695 - DNA, 19 bp, Artificial Sequence
  Description of Artificial Sequence: Synthetic oligonucleotide
ggtgggtatccaacaggat

SEQ ID NO: 6696 - DNA, 19 bp, Artificial Sequence
  Description of Artificial Sequence: Synthetic oligonucleotide
gtgggtatccaacaggatg

SEQ ID NO: 6697 - DNA, 19 bp, Artificial Sequence
  Description of Artificial Sequence: Synthetic oligonucleotide
tgggtatccaacaggatgt

SEQ ID NO: 6698 - DNA, 19 bp, Artificial Sequence
  Description of Artificial Sequence: Synthetic oligonucleotide
gggtatccaacaggatgtg

SEQ ID NO: 6699 - DNA, 19 bp, Artificial Sequence
  Description of Artificial Sequence: Synthetic oligonucleotide
ggtatccaacaggatgtga

SEQ ID NO: 6700 - DNA, 19 bp, Artificial Sequence
  Description of Artificial Sequence: Synthetic oligonucleotide
gtatccaacaggatgtgac

SEQ ID NO: 6701 - DNA, 19 bp, Artificial Sequence
  Description of Artificial Sequence: Synthetic oligonucleotide
tatccaacaggatgtgaca

SEQ ID NO: 6702 - DNA, 19 bp, Artificial Sequence
  Description of Artificial Sequence: Synthetic oligonucleotide
atccaacaggatgtgacac

SEQ ID NO: 6703 - DNA, 19 bp, Artificial Sequence
  Description of Artificial Sequence: Synthetic oligonucleotide
tccaacaggatgtgacaca

SEQ ID NO: 6704 - DNA, 19 bp, Artificial Sequence
  Description of Artificial Sequence: Synthetic oligonucleotide
ccaacaggatgtgacacat

SEQ ID NO: 6705 - DNA, 19 bp, Artificial Sequence
  Description of Artificial Sequence: Synthetic oligonucleotide
caacaggatgtgacacata

SEQ ID NO: 6706 - DNA, 19 bp, Artificial Sequence
  Description of Artificial Sequence: Synthetic oligonucleotide
aacaggatgtgacacatac

SEQ ID NO: 6707 - DNA, 19 bp, Artificial Sequence
  Description of Artificial Sequence: Synthetic oligonucleotide
acaggatgtgacacatacc

SEQ ID NO: 6708 - DNA, 19 bp, Artificial Sequence
  Description of Artificial Sequence: Synthetic oligonucleotide
caggatgtgacacatacca

SEQ ID NO: 6709 - DNA, 19 bp, Artificial Sequence
  Description of Artificial Sequence: Synthetic oligonucleotide
aggatgtgacacataccaa

SEQ ID NO: 6710 - DNA, 19 bp, Artificial Sequence
  Description of Artificial Sequence: Synthetic oligonucleotide
ggatgtgacacataccaat

SEQ ID NO: 6711 - DNA, 19 bp, Artificial Sequence
  Description of Artificial Sequence: Synthetic oligonucleotide
gatgtgacacataccaatg

SEQ ID NO: 6712 - DNA, 19 bp, Artificial Sequence
  Description of Artificial Sequence: Synthetic oligonucleotide
atgtgacacataccaatgg

SEQ ID NO: 6713 - DNA, 19 bp, Artificial Sequence
  Description of Artificial Sequence: Synthetic oligonucleotide
tgtgacacataccaatggc

SEQ ID NO: 6714 - DNA, 19 bp, Artificial Sequence
  Description of Artificial Sequence: Synthetic oligonucleotide
gtgacacataccaatggct

SEQ ID NO: 6715 - DNA, 19 bp, Artificial Sequence
  Description of Artificial Sequence: Synthetic oligonucleotide
tgacacataccaatggctg

SEQ ID NO: 6716 - DNA, 19 bp, Artificial Sequence
  Description of Artificial Sequence: Synthetic oligonucleotide
gacacataccaatggctgc

SEQ ID NO: 6717 - DNA, 19 bp, Artificial Sequence
  Description of Artificial Sequence: Synthetic oligonucleotide
acacataccaatggctgcg

SEQ ID NO: 6718 - DNA, 19 bp, Artificial Sequence
  Description of Artificial Sequence: Synthetic oligonucleotide
cacataccaatggctgcgt

SEQ ID NO: 6719 - DNA, 19 bp, Artificial Sequence
  Description of Artificial Sequence: Synthetic oligonucleotide
acataccaatggctgcgtg

SEQ ID NO: 6720 - DNA, 19 bp, Artificial Sequence
  Description of Artificial Sequence: Synthetic oligonucleotide
cataccaatggctgcgtgg

SEQ ID NO: 6721 - DNA, 19 bp, Artificial Sequence
  Description of Artificial Sequence: Synthetic oligonucleotide
ataccaatggctgcgtggc

SEQ ID NO: 6722 - DNA, 19 bp, Artificial Sequence
  Description of Artificial Sequence: Synthetic oligonucleotide
taccaatggctgcgtggct

SEQ ID NO: 6723 - DNA, 19 bp, Artificial Sequence
  Description of Artificial Sequence: Synthetic oligonucleotide
accaatggctgcgtggctc

SEQ ID NO: 6724 - DNA, 19 bp, Artificial Sequence
  Description of Artificial Sequence: Synthetic oligonucleotide
ccaatggctgcgtggctct

SEQ ID NO: 6725 - DNA, 19 bp, Artificial Sequence
  Description of Artificial Sequence: Synthetic oligonucleotide
caatggctgcgtggctctg

SEQ ID NO: 6726 - DNA, 19 bp, Artificial Sequence
  Description of Artificial Sequence: Synthetic oligonucleotide
aatggctgcgtggctctgg

SEQ ID NO: 6727 - DNA, 19 bp, Artificial Sequence
  Description of Artificial Sequence: Synthetic oligonucleotide
atggctgcgtggctctggg

SEQ ID NO: 6728 - DNA, 19 bp, Artificial Sequence
  Description of Artificial Sequence: Synthetic oligonucleotide
tggctgcgtggctctgggc

SEQ ID NO: 6729 - DNA, 19 bp, Artificial Sequence
  Description of Artificial Sequence: Synthetic oligonucleotide
ggctgcgtggctctgggca

SEQ ID NO: 6730 - DNA, 19 bp, Artificial Sequence
  Description of Artificial Sequence: Synthetic oligonucleotide
gctgcgtggctctgggcat

SEQ ID NO: 6731 - DNA, 19 bp, Artificial Sequence
  Description of Artificial Sequence: Synthetic oligonucleotide
ctgcgtggctctgggcatc

SEQ ID NO: 6732 - DNA, 19 bp, Artificial Sequence
  Description of Artificial Sequence: Synthetic oligonucleotide
tgcgtggctctgggcatca

SEQ ID NO: 6733 - DNA, 19 bp, Artificial Sequence
  Description of Artificial Sequence: Synthetic oligonucleotide
gcgtggctctgggcatcaa

SEQ ID NO: 6734 - DNA, 19 bp, Artificial Sequence
  Description of Artificial Sequence: Synthetic oligonucleotide
cgtggctctgggcatcaaa

SEQ ID NO: 6735 - DNA, 19 bp, Artificial Sequence
  Description of Artificial Sequence: Synthetic oligonucleotide
gtggctctgggcatcaaac

SEQ ID NO: 6736 - DNA, 19 bp, Artificial Sequence
  Description of Artificial Sequence: Synthetic oligonucleotide
tggctctgggcatcaaact

SEQ ID NO: 6737 - DNA, 19 bp, Artificial Sequence
  Description of Artificial Sequence: Synthetic oligonucleotide
ggctctgggcatcaaacta

SEQ ID NO: 6738 - DNA, 19 bp, Artificial Sequence
  Description of Artificial Sequence: Synthetic oligonucleotide
gctctgggcatcaaactac

SEQ ID NO: 6739 - DNA, 19 bp, Artificial Sequence
  Description of Artificial Sequence: Synthetic oligonucleotide
ctctgggcatcaaactacc

SEQ ID NO: 6740 - DNA, 19 bp, Artificial Sequence
  Description of Artificial Sequence: Synthetic oligonucleotide
tctgggcatcaaactacct

SEQ ID NO: 6741 - DNA, 19 bp, Artificial Sequence
  Description of Artificial Sequence: Synthetic oligonucleotide
ctgggcatcaaactacctc

SEQ ID NO: 6742 - DNA, 19 bp, Artificial Sequence
  Description of Artificial Sequence: Synthetic oligonucleotide
tgggcatcaaactacctca

SEQ ID NO: 6743 - DNA, 19 bp, Artificial Sequence
  Description of Artificial Sequence: Synthetic oligonucleotide
gggcatcaaactacctcac

SEQ ID NO: 6744 - DNA, 19 bp, Artificial Sequence
  Description of Artificial Sequence: Synthetic oligonucleotide
ggcatcaaactacctcaca

SEQ ID NO: 6745 - DNA, 19 bp, Artificial Sequence
  Description of Artificial Sequence: Synthetic oligonucleotide
gcatcaaactacctcacac

SEQ ID NO: 6746 - DNA, 19 bp, Artificial Sequence
  Description of Artificial Sequence: Synthetic oligonucleotide
catcaaactacctcacaca

SEQ ID NO: 6747 - DNA, 19 bp, Artificial Sequence
  Description of Artificial Sequence: Synthetic oligonucleotide
atcaaactacctcacacag

SEQ ID NO: 6748 - DNA, 19 bp, Artificial Sequence
  Description of Artificial Sequence: Synthetic oligonucleotide
tcaaactacctcacacaga

SEQ ID NO: 6749 - DNA, 19 bp, Artificial Sequence
  Description of Artificial Sequence: Synthetic oligonucleotide
caaactacctcacacagaa

SEQ ID NO: 6750 - DNA, 19 bp, Artificial Sequence
  Description of Artificial Sequence: Synthetic oligonucleotide
aaactacctcacacagaat

SEQ ID NO: 6751 - DNA, 19 bp, Artificial Sequence
  Description of Artificial Sequence: Synthetic oligonucleotide
aactacctcacacagaata

SEQ ID NO: 6752 - DNA, 19 bp, Artificial Sequence
  Description of Artificial Sequence: Synthetic oligonucleotide
actacctcacacagaatat

SEQ ID NO: 6753 - DNA, 19 bp, Artificial Sequence
  Description of Artificial Sequence: Synthetic oligonucleotide
ctacctcacacagaatatg

SEQ ID NO: 6754 - DNA, 19 bp, Artificial Sequence
  Description of Artificial Sequence: Synthetic oligonucleotide
tacctcacacagaatatga

SEQ ID NO: 6755 - DNA, 19 bp, Artificial Sequence
  Description of Artificial Sequence: Synthetic oligonucleotide
acctcacacagaatatgag

SEQ ID NO: 6756 - DNA, 19 bp, Artificial Sequence
  Description of Artificial Sequence: Synthetic oligonucleotide
cctcacacagaatatgaga

SEQ ID NO: 6757 - DNA, 19 bp, Artificial Sequence
  Description of Artificial Sequence: Synthetic oligonucleotide
ctcacacagaatatgagat

SEQ ID NO: 6758 - DNA, 19 bp, Artificial Sequence
  Description of Artificial Sequence: Synthetic oligonucleotide
tcacacagaatatgagatc

SEQ ID NO: 6759 - DNA, 19 bp, Artificial Sequence
  Description of Artificial Sequence: Synthetic oligonucleotide
cacacagaatatgagatct

SEQ ID NO: 6760 - DNA, 19 bp, Artificial Sequence
  Description of Artificial Sequence: Synthetic oligonucleotide
acacagaatatgagatctt

SEQ ID NO: 6761 - DNA, 19 bp, Artificial Sequence
  Description of Artificial Sequence: Synthetic oligonucleotide
cacagaatatgagatcttc

SEQ ID NO: 6762 - DNA, 19 bp, Artificial Sequence
  Description of Artificial Sequence: Synthetic oligonucleotide
acagaatatgagatcttca

SEQ ID NO: 6763 - DNA, 19 bp, Artificial Sequence
  Description of Artificial Sequence: Synthetic oligonucleotide
cagaatatgagatcttcaa

SEQ ID NO: 6764 - DNA, 19 bp, Artificial Sequence
  Description of Artificial Sequence: Synthetic oligonucleotide
agaatatgagatcttcaaa

SEQ ID NO: 6765 - DNA, 19 bp, Artificial Sequence
  Description of Artificial Sequence: Synthetic oligonucleotide
gaatatgagatcttcaaaa

SEQ ID NO: 6766 - DNA, 19 bp, Artificial Sequence
  Description of Artificial Sequence: Synthetic oligonucleotide
aatatgagatcttcaaaat

SEQ ID NO: 6767 - DNA, 19 bp, Artificial Sequence
  Description of Artificial Sequence: Synthetic oligonucleotide
atatgagatcttcaaaatg

SEQ ID NO: 6768 - DNA, 19 bp, Artificial Sequence
  Description of Artificial Sequence: Synthetic oligonucleotide
tatgagatcttcaaaatgg

SEQ ID NO: 6769 - DNA, 19 bp, Artificial Sequence
  Description of Artificial Sequence: Synthetic oligonucleotide
atgagatcttcaaaatgga

SEQ ID NO: 6770 - DNA, 19 bp, Artificial Sequence
  Description of Artificial Sequence: Synthetic oligonucleotide
tgagatcttcaaaatggag

SEQ ID NO: 6771 - DNA, 19 bp, Artificial Sequence
  Description of Artificial Sequence: Synthetic oligonucleotide
gagatcttcaaaatggagc

SEQ ID NO: 6772 - DNA, 19 bp, Artificial Sequence
  Description of Artificial Sequence: Synthetic oligonucleotide
agatcttcaaaatggagca

SEQ ID NO: 6773 - DNA, 19 bp, Artificial Sequence
  Description of Artificial Sequence: Synthetic oligonucleotide
gatcttcaaaatggagcaa

SEQ ID NO: 6774 - DNA, 19 bp, Artificial Sequence
  Description of Artificial Sequence: Synthetic oligonucleotide
atcttcaaaatggagcaag

SEQ ID NO: 6775 - DNA, 19 bp, Artificial Sequence
  Description of Artificial Sequence: Synthetic oligonucleotide
tcttcaaaatggagcaaga

SEQ ID NO: 6776 - DNA, 19 bp, Artificial Sequence
  Description of Artificial Sequence: Synthetic oligonucleotide
cttcaaaatggagcaagac

SEQ ID NO: 6777 - DNA, 19 bp, Artificial Sequence
  Description of Artificial Sequence: Synthetic oligonucleotide
ttcaaaatggagcaagaca

SEQ ID NO: 6778 - DNA, 19 bp, Artificial Sequence
  Description of Artificial Sequence: Synthetic oligonucleotide
tcaaaatggagcaagacac

SEQ ID NO: 6779 - DNA, 19 bp, Artificial Sequence
  Description of Artificial Sequence: Synthetic oligonucleotide
caaaatggagcaagacacc

SEQ ID NO: 6780 - DNA, 19 bp, Artificial Sequence
  Description of Artificial Sequence: Synthetic oligonucleotide
aaaatggagcaagacaccc

SEQ ID NO: 6781 - DNA, 19 bp, Artificial Sequence
  Description of Artificial Sequence: Synthetic oligonucleotide
aaatggagcaagacacccg

SEQ ID NO: 6782 - DNA, 19 bp, Artificial Sequence
  Description of Artificial Sequence: Synthetic oligonucleotide
aatggagcaagacacccga

SEQ ID NO: 6783 - DNA, 19 bp, Artificial Sequence
  Description of Artificial Sequence: Synthetic oligonucleotide
atggagcaagacacccgag

SEQ ID NO: 6784 - DNA, 19 bp, Artificial Sequence
  Description of Artificial Sequence: Synthetic oligonucleotide
tggagcaagacacccgagg

SEQ ID NO: 6785 - DNA, 19 bp, Artificial Sequence
  Description of Artificial Sequence: Synthetic oligonucleotide
ggagcaagacacccgaggc

SEQ ID NO: 6786 - DNA, 19 bp, Artificial Sequence
  Description of Artificial Sequence: Synthetic oligonucleotide
gagcaagacacccgaggcc

SEQ ID NO: 6787 - DNA, 19 bp, Artificial Sequence
  Description of Artificial Sequence: Synthetic oligonucleotide
agcaagacacccgaggccg

SEQ ID NO: 6788 - DNA, 19 bp, Artificial Sequence
  Description of Artificial Sequence: Synthetic oligonucleotide
gcaagacacccgaggccgc

SEQ ID NO: 6789 - DNA, 19 bp, Artificial Sequence
  Description of Artificial Sequence: Synthetic oligonucleotide
caagacacccgaggccgct

SEQ ID NO: 6790 - DNA, 19 bp, Artificial Sequence
  Description of Artificial Sequence: Synthetic oligonucleotide
aagacacccgaggccgcta

SEQ ID NO: 6791 - DNA, 19 bp, Artificial Sequence
  Description of Artificial Sequence: Synthetic oligonucleotide
agacacccgaggccgctac

SEQ ID NO: 6792 - DNA, 19 bp, Artificial Sequence
  Description of Artificial Sequence: Synthetic oligonucleotide
gacacccgaggccgctacc

SEQ ID NO: 6793 - DNA, 19 bp, Artificial Sequence
  Description of Artificial Sequence: Synthetic oligonucleotide
acacccgaggccgctacct

SEQ ID NO: 6794 - DNA, 19 bp, Artificial Sequence
  Description of Artificial Sequence: Synthetic oligonucleotide
cacccgaggccgctacctg

SEQ ID NO: 6795 - DNA, 19 bp, Artificial Sequence
  Description of Artificial Sequence: Synthetic oligonucleotide
acccgaggccgctacctgc

SEQ ID NO: 6796 - DNA, 19 bp, Artificial Sequence
  Description of Artificial Sequence: Synthetic oligonucleotide
cccgaggccgctacctgct

SEQ ID NO: 6797 - DNA, 19 bp, Artificial Sequence
  Description of Artificial Sequence: Synthetic oligonucleotide
ccgaggccgctacctgctg

SEQ ID NO: 6798 - DNA, 19 bp, Artificial Sequence
  Description of Artificial Sequence: Synthetic oligonucleotide
cgaggccgctacctgctgt

SEQ ID NO: 6799 - DNA, 19 bp, Artificial Sequence
  Description of Artificial Sequence: Synthetic oligonucleotide
gaggccgctacctgctgtt

SEQ ID NO: 6800 - DNA, 19 bp, Artificial Sequence
  Description of Artificial Sequence: Synthetic oligonucleotide
aggccgctacctgctgttc

SEQ ID NO: 6801 - DNA, 19 bp, Artificial Sequence
  Description of Artificial Sequence: Synthetic oligonucleotide
ggccgctacctgctgttca

SEQ ID NO: 6802 - DNA, 19 bp, Artificial Sequence
  Description of Artificial Sequence: Synthetic oligonucleotide
gccgctacctgctgttcaa

SEQ ID NO: 6803 - DNA, 19 bp, Artificial Sequence
  Description of Artificial Sequence: Synthetic oligonucleotide
ccgctacctgctgttcaat

SEQ ID NO: 6804 - DNA, 19 bp, Artificial Sequence
  Description of Artificial Sequence: Synthetic oligonucleotide
cgctacctgctgttcaatg

SEQ ID NO: 6805 - DNA, 19 bp, Artificial Sequence
  Description of Artificial Sequence: Synthetic oligonucleotide
gctacctgctgttcaatgg

SEQ ID NO: 6806 - DNA, 19 bp, Artificial Sequence
  Description of Artificial Sequence: Synthetic oligonucleotide
ctacctgctgttcaatggc

SEQ ID NO: 6807 - DNA, 19 bp, Artificial Sequence
  Description of Artificial Sequence: Synthetic oligonucleotide
tacctgctgttcaatggcc

SEQ ID NO: 6808 - DNA, 19 bp, Artificial Sequence
  Description of Artificial Sequence: Synthetic oligonucleotide
acctgctgttcaatggcca

SEQ ID NO: 6809 - DNA, 19 bp, Artificial Sequence
  Description of Artificial Sequence: Synthetic oligonucleotide
cctgctgttcaatggccag

SEQ ID NO: 6810 - DNA, 19 bp, Artificial Sequence
  Description of Artificial Sequence: Synthetic oligonucleotide
ctgctgttcaatggccaga

SEQ ID NO: 6811 - DNA, 19 bp, Artificial Sequence
  Description of Artificial Sequence: Synthetic oligonucleotide
tgctgttcaatggccagag

SEQ ID NO: 6812 - DNA, 19 bp, Artificial Sequence
  Description of Artificial Sequence: Synthetic oligonucleotide
gctgttcaatggccagagg

SEQ ID NO: 6813 - DNA, 19 bp, Artificial Sequence
  Description of Artificial Sequence: Synthetic oligonucleotide
ctgttcaatggccagaggc

SEQ ID NO: 6814 - DNA, 19 bp, Artificial Sequence
  Description of Artificial Sequence: Synthetic oligonucleotide
tgttcaatggccagaggcc

SEQ ID NO: 6815 - DNA, 19 bp, Artificial Sequence
  Description of Artificial Sequence: Synthetic oligonucleotide
gttcaatggccagaggccc

SEQ ID NO: 6816 - DNA, 19 bp, Artificial Sequence
  Description of Artificial Sequence: Synthetic oligonucleotide
ttcaatggccagaggccca

SEQ ID NO: 6817 - DNA, 19 bp, Artificial Sequence
  Description of Artificial Sequence: Synthetic oligonucleotide
tcaatggccagaggcccag

SEQ ID NO: 6818 - DNA, 19 bp, Artificial Sequence
  Description of Artificial Sequence: Synthetic oligonucleotide
caatggccagaggcccagc

SEQ ID NO: 6819 - DNA, 19 bp, Artificial Sequence
  Description of Artificial Sequence: Synthetic oligonucleotide
aatggccagaggcccagcg

SEQ ID NO: 6820 - DNA, 19 bp, Artificial Sequence
  Description of Artificial Sequence: Synthetic oligonucleotide
atggccagaggcccagcga

SEQ ID NO: 6821 - DNA, 19 bp, Artificial Sequence
  Description of Artificial Sequence: Synthetic oligonucleotide
tggccagaggcccagcgat

SEQ ID NO: 6822 - DNA, 19 bp, Artificial Sequence
  Description of Artificial Sequence: Synthetic oligonucleotide
ggccagaggcccagcgatg

SEQ ID NO: 6823 - DNA, 19 bp, Artificial Sequence
  Description of Artificial Sequence: Synthetic oligonucleotide
gccagaggcccagcgatgg

SEQ ID NO: 6824 - DNA, 19 bp, Artificial Sequence
  Description of Artificial Sequence: Synthetic oligonucleotide
ccagaggcccagcgatggc

SEQ ID NO: 6825 - DNA, 19 bp, Artificial Sequence
  Description of Artificial Sequence: Synthetic oligonucleotide
cagaggcccagcgatggct

SEQ ID NO: 6826 - DNA, 19 bp, Artificial Sequence
  Description of Artificial Sequence: Synthetic oligonucleotide
agaggcccagcgatggctc

SEQ ID NO: 6827 - DNA, 19 bp, Artificial Sequence
  Description of Artificial Sequence: Synthetic oligonucleotide
gaggcccagcgatggctcc

SEQ ID NO: 6828 - DNA, 19 bp, Artificial Sequence
  Description of Artificial Sequence: Synthetic oligonucleotide
aggcccagcgatggctcca

SEQ ID NO: 6829 - DNA, 19 bp, Artificial Sequence
  Description of Artificial Sequence: Synthetic oligonucleotide
ggcccagcgatggctccag

SEQ ID NO: 6830 - DNA, 19 bp, Artificial Sequence
  Description of Artificial Sequence: Synthetic oligonucleotide
gcccagcgatggctccagc

SEQ ID NO: 6831 - DNA, 19 bp, Artificial Sequence
  Description of Artificial Sequence: Synthetic oligonucleotide
cccagcgatggctccagcc

SEQ ID NO: 6832 - DNA, 19 bp, Artificial Sequence
  Description of Artificial Sequence: Synthetic oligonucleotide
ccagcgatggctccagccc

SEQ ID NO: 6833 - DNA, 19 bp, Artificial Sequence
  Description of Artificial Sequence: Synthetic oligonucleotide
cagcgatggctccagccca

SEQ ID NO: 6834 - DNA, 19 bp, Artificial Sequence
  Description of Artificial Sequence: Synthetic oligonucleotide
agcgatggctccagcccag

SEQ ID NO: 6835 - DNA, 19 bp, Artificial Sequence
  Description of Artificial Sequence: Synthetic oligonucleotide
gcgatggctccagcccaga

SEQ ID NO: 6836 - DNA, 19 bp, Artificial Sequence
  Description of Artificial Sequence: Synthetic oligonucleotide
cgatggctccagcccagac

SEQ ID NO: 6837 - DNA, 19 bp, Artificial Sequence
  Description of Artificial Sequence: Synthetic oligonucleotide
gatggctccagcccagaca

SEQ ID NO: 6838 - DNA, 19 bp, Artificial Sequence
  Description of Artificial Sequence: Synthetic oligonucleotide
atggctccagcccagacag

SEQ ID NO: 6839 - DNA, 19 bp, Artificial Sequence
  Description of Artificial Sequence: Synthetic oligonucleotide
tggctccagcccagacaga

SEQ ID NO: 6840 - DNA, 19 bp, Artificial Sequence
  Description of Artificial Sequence: Synthetic oligonucleotide
ggctccagcccagacagac

SEQ ID NO: 6841 - DNA, 19 bp, Artificial Sequence
  Description of Artificial Sequence: Synthetic oligonucleotide
gctccagcccagacagacc

SEQ ID NO: 6842 - DNA, 19 bp, Artificial Sequence
  Description of Artificial Sequence: Synthetic oligonucleotide
ctccagcccagacagacca

SEQ ID NO: 6843 - DNA, 19 bp, Artificial Sequence
  Description of Artificial Sequence: Synthetic oligonucleotide
tccagcccagacagaccag

SEQ ID NO: 6844 - DNA, 19 bp, Artificial Sequence
  Description of Artificial Sequence: Synthetic oligonucleotide
ccagcccagacagaccaga

SEQ ID NO: 6845 - DNA, 19 bp, Artificial Sequence
  Description of Artificial Sequence: Synthetic oligonucleotide
cagcccagacagaccagag

SEQ ID NO: 6846 - DNA, 19 bp, Artificial Sequence
  Description of Artificial Sequence: Synthetic oligonucleotide
agcccagacagaccagaga

SEQ ID NO: 6847 - DNA, 19 bp, Artificial Sequence
  Description of Artificial Sequence: Synthetic oligonucleotide
gcccagacagaccagagaa

SEQ ID NO: 6848 - DNA, 19 bp, Artificial Sequence
  Description of Artificial Sequence: Synthetic oligonucleotide
cccagacagaccagagaag

SEQ ID NO: 6849 - DNA, 19 bp, Artificial Sequence
  Description of Artificial Sequence: Synthetic oligonucleotide
ccagacagaccagagaaga

SEQ ID NO: 6850 - DNA, 19 bp, Artificial Sequence
  Description of Artificial Sequence: Synthetic oligonucleotide
cagacagaccagagaagag

SEQ ID NO: 6851 - DNA, 19 bp, Artificial Sequence
  Description of Artificial Sequence: Synthetic oligonucleotide
agacagaccagagaagaga

SEQ ID NO: 6852 - DNA, 19 bp, Artificial Sequence
  Description of Artificial Sequence: Synthetic oligonucleotide
gacagaccagagaagagag

SEQ ID NO: 6853 - DNA, 19 bp, Artificial Sequence
  Description of Artificial Sequence: Synthetic oligonucleotide
acagaccagagaagagagc

SEQ ID NO: 6854 - DNA, 19 bp, Artificial Sequence
  Description of Artificial Sequence: Synthetic oligonucleotide
cagaccagagaagagagcc

SEQ ID NO: 6855 - DNA, 19 bp, Artificial Sequence
  Description of Artificial Sequence: Synthetic oligonucleotide
agaccagagaagagagcca

SEQ ID NO: 6856 - DNA, 19 bp, Artificial Sequence
  Description of Artificial Sequence: Synthetic oligonucleotide
gaccagagaagagagccac

SEQ ID NO: 6857 - DNA, 19 bp, Artificial Sequence
  Description of Artificial Sequence: Synthetic oligonucleotide
accagagaagagagccaca

SEQ ID NO: 6858 - DNA, 19 bp, Artificial Sequence
  Description of Artificial Sequence: Synthetic oligonucleotide
ccagagaagagagccacat

SEQ ID NO: 6859 - DNA, 19 bp, Artificial Sequence
  Description of Artificial Sequence: Synthetic oligonucleotide
cagagaagagagccacatc

SEQ ID NO: 6860 - DNA, 19 bp, Artificial Sequence
  Description of Artificial Sequence: Synthetic oligonucleotide
agagaagagagccacatcc

SEQ ID NO: 6861 - DNA, 19 bp, Artificial Sequence
  Description of Artificial Sequence: Synthetic oligonucleotide
gagaagagagccacatcct

SEQ ID NO: 6862 - DNA, 19 bp, Artificial Sequence
  Description of Artificial Sequence: Synthetic oligonucleotide
agaagagagccacatccta

SEQ ID NO: 6863 - DNA, 19 bp, Artificial Sequence
  Description of Artificial Sequence: Synthetic oligonucleotide
gaagagagccacatcctac

SEQ ID NO: 6864 - DNA, 19 bp, Artificial Sequence
  Description of Artificial Sequence: Synthetic oligonucleotide
aagagagccacatcctacc

SEQ ID NO: 6865 - DNA, 19 bp, Artificial Sequence
  Description of Artificial Sequence: Synthetic oligonucleotide
agagagccacatcctacca

SEQ ID NO: 6866 - DNA, 19 bp, Artificial Sequence
  Description of Artificial Sequence: Synthetic oligonucleotide
gagagccacatcctaccag

SEQ ID NO: 6867 - DNA, 19 bp, Artificial Sequence
  Description of Artificial Sequence: Synthetic oligonucleotide
agagccacatcctaccaga

SEQ ID NO: 6868 - DNA, 19 bp, Artificial Sequence
  Description of Artificial Sequence: Synthetic oligonucleotide
gagccacatcctaccagat

SEQ ID NO: 6869 - DNA, 19 bp, Artificial Sequence
  Description of Artificial Sequence: Synthetic oligonucleotide
agccacatcctaccagatg

SEQ ID NO: 6870 - DNA, 19 bp, Artificial Sequence
  Description of Artificial Sequence: Synthetic oligonucleotide
gccacatcctaccagatgc

SEQ ID NO: 6871 - DNA, 19 bp, Artificial Sequence
  Description of Artificial Sequence: Synthetic oligonucleotide
ccacatcctaccagatgcc

SEQ ID NO: 6872 - DNA, 19 bp, Artificial Sequence
  Description of Artificial Sequence: Synthetic oligonucleotide
cacatcctaccagatgccc

SEQ ID NO: 6873 - DNA, 19 bp, Artificial Sequence
  Description of Artificial Sequence: Synthetic oligonucleotide
acatcctaccagatgccct

SEQ ID NO: 6874 - DNA, 19 bp, Artificial Sequence
  Description of Artificial Sequence: Synthetic oligonucleotide
catcctaccagatgccctt

SEQ ID NO: 6875 - DNA, 19 bp, Artificial Sequence
  Description of Artificial Sequence: Synthetic oligonucleotide
atcctaccagatgcccttg

SEQ ID NO: 6876 - DNA, 19 bp, Artificial Sequence
  Description of Artificial Sequence: Synthetic oligonucleotide
tcctaccagatgcccttgg

SEQ ID NO: 6877 - DNA, 19 bp, Artificial Sequence
  Description of Artificial Sequence: Synthetic oligonucleotide
cctaccagatgcccttggt

SEQ ID NO: 6878 - DNA, 19 bp, Artificial Sequence
  Description of Artificial Sequence: Synthetic oligonucleotide
ctaccagatgcccttggtc

SEQ ID NO: 6879 - DNA, 19 bp, Artificial Sequence
  Description of Artificial Sequence: Synthetic oligonucleotide
taccagatgcccttggtcc

SEQ ID NO: 6880 - DNA, 19 bp, Artificial Sequence
  Description of Artificial Sequence: Synthetic oligonucleotide
accagatgcccttggtcca

SEQ ID NO: 6881 - DNA, 19 bp, Artificial Sequence
  Description of Artificial Sequence: Synthetic oligonucleotide
ccagatgcccttggtccag

SEQ ID NO: 6882 - DNA, 19 bp, Artificial Sequence
  Description of Artificial Sequence: Synthetic oligonucleotide
cagatgcccttggtccagt

SEQ ID NO: 6883 - DNA, 19 bp, Artificial Sequence
  Description of Artificial Sequence: Synthetic oligonucleotide
agatgcccttggtccagtg

SEQ ID NO: 6884 - DNA, 19 bp, Artificial Sequence
  Description of Artificial Sequence: Synthetic oligonucleotide
gatgcccttggtccagtgt

SEQ ID NO: 6885 - DNA, 19 bp, Artificial Sequence
  Description of Artificial Sequence: Synthetic oligonucleotide
atgcccttggtccagtgtg

SEQ ID NO: 6886 - DNA, 19 bp, Artificial Sequence
  Description of Artificial Sequence: Synthetic oligonucleotide
tgcccttggtccagtgtgc

SEQ ID NO: 6887 - DNA, 19 bp, Artificial Sequence
  Description of Artificial Sequence: Synthetic oligonucleotide
gcccttggtccagtgtgcc

SEQ ID NO: 6888 - DNA, 19 bp, Artificial Sequence
  Description of Artificial Sequence: Synthetic oligonucleotide
cccttggtccagtgtgcct

SEQ ID NO: 6889 - DNA, 19 bp, Artificial Sequence
  Description of Artificial Sequence: Synthetic oligonucleotide
ccttggtccagtgtgcctc

SEQ ID NO: 6890 - DNA, 19 bp, Artificial Sequence
  Description of Artificial Sequence: Synthetic oligonucleotide
cttggtccagtgtgcctct

SEQ ID NO: 6891 - DNA, 19 bp, Artificial Sequence
  Description of Artificial Sequence: Synthetic oligonucleotide
ttggtccagtgtgcctctt

SEQ ID NO: 6892 - DNA, 19 bp, Artificial Sequence
  Description of Artificial Sequence: Synthetic oligonucleotide
tggtccagtgtgcctcttc

SEQ ID NO: 6893 - DNA, 19 bp, Artificial Sequence
  Description of Artificial Sequence: Synthetic oligonucleotide
ggtccagtgtgcctcttcc

SEQ ID NO: 6894 - DNA, 19 bp, Artificial Sequence
  Description of Artificial Sequence: Synthetic oligonucleotide
gtccagtgtgcctcttcct

SEQ ID NO: 6895 - DNA, 19 bp, Artificial Sequence
  Description of Artificial Sequence: Synthetic oligonucleotide
tccagtgtgcctcttcctc

SEQ ID NO: 6896 - DNA, 19 bp, Artificial Sequence
  Description of Artificial Sequence: Synthetic oligonucleotide
ccagtgtgcctcttcctca

SEQ ID NO: 6897 - DNA, 19 bp, Artificial Sequence
  Description of Artificial Sequence: Synthetic oligonucleotide
cagtgtgcctcttcctcac

SEQ ID NO: 6898 - DNA, 19 bp, Artificial Sequence
  Description of Artificial Sequence: Synthetic oligonucleotide
agtgtgcctcttcctcacc

SEQ ID NO: 6899 - DNA, 19 bp, Artificial Sequence
  Description of Artificial Sequence: Synthetic oligonucleotide
gtgtgcctcttcctcacca

SEQ ID NO: 6900 - DNA, 19 bp, Artificial Sequence
  Description of Artificial Sequence: Synthetic oligonucleotide
tgtgcctcttcctcaccaa

SEQ ID NO: 6901 - DNA, 19 bp, Artificial Sequence
  Description of Artificial Sequence: Synthetic oligonucleotide
gtgcctcttcctcaccaag

SEQ ID NO: 6902 - DNA, 19 bp, Artificial Sequence
  Description of Artificial Sequence: Synthetic oligonucleotide
tgcctcttcctcaccaaga

SEQ ID NO: 6903 - DNA, 19 bp, Artificial Sequence
  Description of Artificial Sequence: Synthetic oligonucleotide
gcctcttcctcaccaagag

SEQ ID NO: 6904 - DNA, 19 bp, Artificial Sequence
  Description of Artificial Sequence: Synthetic oligonucleotide
cctcttcctcaccaagagc

SEQ ID NO: 6905 - DNA, 19 bp, Artificial Sequence
  Description of Artificial Sequence: Synthetic oligonucleotide
ctcttcctcaccaagagct

SEQ ID NO: 6906 - DNA, 19 bp, Artificial Sequence
  Description of Artificial Sequence: Synthetic oligonucleotide
tcttcctcaccaagagctg

SEQ ID NO: 6907 - DNA, 19 bp, Artificial Sequence
  Description of Artificial Sequence: Synthetic oligonucleotide
cttcctcaccaagagctga

SEQ ID NO: 6908 - DNA, 19 bp, Artificial Sequence
  Description of Artificial Sequence: Synthetic oligonucleotide
ttcctcaccaagagctgaa

SEQ ID NO: 6909 - DNA, 19 bp, Artificial Sequence
  Description of Artificial Sequence: Synthetic oligonucleotide
tcctcaccaagagctgaag

SEQ ID NO: 6910 - DNA, 19 bp, Artificial Sequence
  Description of Artificial Sequence: Synthetic oligonucleotide
cctcaccaagagctgaaga

SEQ ID NO: 6911 - DNA, 19 bp, Artificial Sequence
  Description of Artificial Sequence: Synthetic oligonucleotide
ctcaccaagagctgaagag

SEQ ID NO: 6912 - DNA, 19 bp, Artificial Sequence
  Description of Artificial Sequence: Synthetic oligonucleotide
tcaccaagagctgaagagt

SEQ ID NO: 6913 - DNA, 19 bp, Artificial Sequence
  Description of Artificial Sequence: Synthetic oligonucleotide
caccaagagctgaagagtt

SEQ ID NO: 6914 - DNA, 19 bp, Artificial Sequence
  Description of Artificial Sequence: Synthetic oligonucleotide
accaagagctgaagagttg

SEQ ID NO: 6915 - DNA, 19 bp, Artificial Sequence
  Description of Artificial Sequence: Synthetic oligonucleotide
ccaagagctgaagagttgt

SEQ ID NO: 6916 - DNA, 19 bp, Artificial Sequence
  Description of Artificial Sequence: Synthetic oligonucleotide
caagagctgaagagttgtt

SEQ ID NO: 6917 - DNA, 19 bp, Artificial Sequence
  Description of Artificial Sequence: Synthetic oligonucleotide
aagagctgaagagttgttg

SEQ ID NO: 6918 - DNA, 19 bp, Artificial Sequence
  Description of Artificial Sequence: Synthetic oligonucleotide
agagctgaagagttgttgg

SEQ ID NO: 6919 - DNA, 19 bp, Artificial Sequence
  Description of Artificial Sequence: Synthetic oligonucleotide
gagctgaagagttgttgga

SEQ ID NO: 6920 - DNA, 19 bp, Artificial Sequence
  Description of Artificial Sequence: Synthetic oligonucleotide
agctgaagagttgttggaa

SEQ ID NO: 6921 - DNA, 19 bp, Artificial Sequence
  Description of Artificial Sequence: Synthetic oligonucleotide
gctgaagagttgttggaag

SEQ ID NO: 6922 - DNA, 19 bp, Artificial Sequence
  Description of Artificial Sequence: Synthetic oligonucleotide
ctgaagagttgttggaaga

SEQ ID NO: 6923 - DNA, 19 bp, Artificial Sequence
  Description of Artificial Sequence: Synthetic oligonucleotide
tgaagagttgttggaagac

SEQ ID NO: 6924 - DNA, 19 bp, Artificial Sequence
  Description of Artificial Sequence: Synthetic oligonucleotide
gaagagttgttggaagaca

SEQ ID NO: 6925 - DNA, 19 bp, Artificial Sequence
  Description of Artificial Sequence: Synthetic oligonucleotide
aagagttgttggaagacag

SEQ ID NO: 6926 - DNA, 19 bp, Artificial Sequence
  Description of Artificial Sequence: Synthetic oligonucleotide
agagttgttggaagacagt

SEQ ID NO: 6927 - DNA, 19 bp, Artificial Sequence
  Description of Artificial Sequence: Synthetic oligonucleotide
gagttgttggaagacagtc

SEQ ID NO: 6928 - DNA, 19 bp, Artificial Sequence
  Description of Artificial Sequence: Synthetic oligonucleotide
agttgttggaagacagtca

SEQ ID NO: 6929 - DNA, 19 bp, Artificial Sequence
  Description of Artificial Sequence: Synthetic oligonucleotide
gttgttggaagacagtcaa

SEQ ID NO: 6930 - DNA, 19 bp, Artificial Sequence
  Description of Artificial Sequence: Synthetic oligonucleotide
ttgttggaagacagtcaag

SEQ ID NO: 6931 - DNA, 19 bp, Artificial Sequence
  Description of Artificial Sequence: Synthetic oligonucleotide
tgttggaagacagtcaagg

SEQ ID NO: 6932 - DNA, 19 bp, Artificial Sequence
  Description of Artificial Sequence: Synthetic oligonucleotide
gttggaagacagtcaaggt

SEQ ID NO: 6933 - DNA, 19 bp, Artificial Sequence
  Description of Artificial Sequence: Synthetic oligonucleotide
ttggaagacagtcaaggtc

SEQ ID NO: 6934 - DNA, 19 bp, Artificial Sequence
  Description of Artificial Sequence: Synthetic oligonucleotide
tggaagacagtcaaggtca

SEQ ID NO: 6935 - DNA, 19 bp, Artificial Sequence
  Description of Artificial Sequence: Synthetic oligonucleotide
ggaagacagtcaaggtcat

SEQ ID NO: 6936 - DNA, 19 bp, Artificial Sequence
  Description of Artificial Sequence: Synthetic oligonucleotide
gaagacagtcaaggtcatc

SEQ ID NO: 6937 - DNA, 19 bp, Artificial Sequence
  Description of Artificial Sequence: Synthetic oligonucleotide
aagacagtcaaggtcatct

SEQ ID NO: 6938 - DNA, 19 bp, Artificial Sequence
  Description of Artificial Sequence: Synthetic oligonucleotide
agacagtcaaggtcatctg

SEQ ID NO: 6939 - DNA, 19 bp, Artificial Sequence
  Description of Artificial Sequence: Synthetic oligonucleotide
gacagtcaaggtcatctgt

SEQ ID NO: 6940 - DNA, 19 bp, Artificial Sequence
  Description of Artificial Sequence: Synthetic oligonucleotide
acagtcaaggtcatctgta

SEQ ID NO: 6941 - DNA, 19 bp, Artificial Sequence
  Description of Artificial Sequence: Synthetic oligonucleotide
cagtcaaggtcatctgtat

SEQ ID NO: 6942 - DNA, 19 bp, Artificial Sequence
  Description of Artificial Sequence: Synthetic oligonucleotide
agtcaaggtcatctgtatg

SEQ ID NO: 6943 - DNA, 19 bp, Artificial Sequence
  Description of Artificial Sequence: Synthetic oligonucleotide
gtcaaggtcatctgtatgg

SEQ ID NO: 6944 - DNA, 19 bp, Artificial Sequence
  Description of Artificial Sequence: Synthetic oligonucleotide
tcaaggtcatctgtatggc

SEQ ID NO: 6945 - DNA, 19 bp, Artificial Sequence
  Description of Artificial Sequence: Synthetic oligonucleotide
caaggtcatctgtatggca

SEQ ID NO: 6946 - DNA, 19 bp, Artificial Sequence
  Description of Artificial Sequence: Synthetic oligonucleotide
aaggtcatctgtatggcag

SEQ ID NO: 6947 - DNA, 19 bp, Artificial Sequence
  Description of Artificial Sequence: Synthetic oligonucleotide
aggtcatctgtatggcagg

SEQ ID NO: 6948 - DNA, 19 bp, Artificial Sequence
  Description of Artificial Sequence: Synthetic oligonucleotide
ggtcatctgtatggcaggg

SEQ ID NO: 6949 - DNA, 19 bp, Artificial Sequence
  Description of Artificial Sequence: Synthetic oligonucleotide
gtcatctgtatggcagggc

SEQ ID NO: 6950 - DNA, 19 bp, Artificial Sequence
  Description of Artificial Sequence: Synthetic oligonucleotide
tcatctgtatggcagggca

SEQ ID NO: 6951 - DNA, 19 bp, Artificial Sequence
  Description of Artificial Sequence: Synthetic oligonucleotide
catctgtatggcagggcag

SEQ ID NO: 6952 - DNA, 19 bp, Artificial Sequence
  Description of Artificial Sequence: Synthetic oligonucleotide
atctgtatggcagggcagc

SEQ ID NO: 6953 - DNA, 19 bp, Artificial Sequence
  Description of Artificial Sequence: Synthetic oligonucleotide
tctgtatggcagggcagca

SEQ ID NO: 6954 - DNA, 19 bp, Artificial Sequence
  Description of Artificial Sequence: Synthetic oligonucleotide
ctgtatggcagggcagcag

SEQ ID NO: 6955 - DNA, 19 bp, Artificial Sequence
  Description of Artificial Sequence: Synthetic oligonucleotide
tgtatggcagggcagcagg

SEQ ID NO: 6956 - DNA, 19 bp, Artificial Sequence
  Description of Artificial Sequence: Synthetic oligonucleotide
gtatggcagggcagcaggg

SEQ ID NO: 6957 - DNA, 19 bp, Artificial Sequence
  Description of Artificial Sequence: Synthetic oligonucleotide
tatggcagggcagcaggga

SEQ ID NO: 6958 - DNA, 19 bp, Artificial Sequence
  Description of Artificial Sequence: Synthetic oligonucleotide
atggcagggcagcagggag

SEQ ID NO: 6959 - DNA, 19 bp, Artificial Sequence
  Description of Artificial Sequence: Synthetic oligonucleotide
tggcagggcagcagggagg

SEQ ID NO: 6960 - DNA, 19 bp, Artificial Sequence
  Description of Artificial Sequence: Synthetic oligonucleotide
ggcagggcagcagggagga

SEQ ID NO: 6961 - DNA, 19 bp, Artificial Sequence
  Description of Artificial Sequence: Synthetic oligonucleotide
gcagggcagcagggaggac

SEQ ID NO: 6962 - DNA, 19 bp, Artificial Sequence
  Description of Artificial Sequence: Synthetic oligonucleotide
cagggcagcagggaggaca

SEQ ID NO: 6963 - DNA, 19 bp, Artificial Sequence
  Description of Artificial Sequence: Synthetic oligonucleotide
agggcagcagggaggacag

SEQ ID NO: 6964 - DNA, 19 bp, Artificial Sequence
  Description of Artificial Sequence: Synthetic oligonucleotide
gggcagcagggaggacagc

SEQ ID NO: 6965 - DNA, 19 bp, Artificial Sequence
  Description of Artificial Sequence: Synthetic oligonucleotide
ggcagcagggaggacagct

SEQ ID NO: 6966 - DNA, 19 bp, Artificial Sequence
  Description of Artificial Sequence: Synthetic oligonucleotide
gcagcagggaggacagctg

SEQ ID NO: 6967 - DNA, 19 bp, Artificial Sequence
  Description of Artificial Sequence: Synthetic oligonucleotide
cagcagggaggacagctgg

SEQ ID NO: 6968 - DNA, 19 bp, Artificial Sequence
  Description of Artificial Sequence: Synthetic oligonucleotide
agcagggaggacagctggg

SEQ ID NO: 6969 - DNA, 19 bp, Artificial Sequence
  Description of Artificial Sequence: Synthetic oligonucleotide
gcagggaggacagctgggt

SEQ ID NO: 6970 - DNA, 19 bp, Artificial Sequence
  Description of Artificial Sequence: Synthetic oligonucleotide
cagggaggacagctgggtc

SEQ ID NO: 6971 - DNA, 19 bp, Artificial Sequence
  Description of Artificial Sequence: Synthetic oligonucleotide
agggaggacagctgggtcc

SEQ ID NO: 6972 - DNA, 19 bp, Artificial Sequence
  Description of Artificial Sequence: Synthetic oligonucleotide
gggaggacagctgggtccc

SEQ ID NO: 6973 - DNA, 19 bp, Artificial Sequence
  Description of Artificial Sequence: Synthetic oligonucleotide
ggaggacagctgggtccct

SEQ ID NO: 6974 - DNA, 19 bp, Artificial Sequence
  Description of Artificial Sequence: Synthetic oligonucleotide
gaggacagctgggtccctg

SEQ ID NO: 6975 - DNA, 19 bp, Artificial Sequence
  Description of Artificial Sequence: Synthetic oligonucleotide
aggacagctgggtccctgt

SEQ ID NO: 6976 - DNA, 19 bp, Artificial Sequence
  Description of Artificial Sequence: Synthetic oligonucleotide
ggacagctgggtccctgtt

SEQ ID NO: 6977 - DNA, 19 bp, Artificial Sequence
  Description of Artificial Sequence: Synthetic oligonucleotide
gacagctgggtccctgttg

SEQ ID NO: 6978 - DNA, 19 bp, Artificial Sequence
  Description of Artificial Sequence: Synthetic oligonucleotide
acagctgggtccctgttgc

SEQ ID NO: 6979 - DNA, 19 bp, Artificial Sequence
  Description of Artificial Sequence: Synthetic oligonucleotide
cagctgggtccctgttgct

SEQ ID NO: 6980 - DNA, 19 bp, Artificial Sequence
  Description of Artificial Sequence: Synthetic oligonucleotide
agctgggtccctgttgctt

SEQ ID NO: 6981 - DNA, 19 bp, Artificial Sequence
  Description of Artificial Sequence: Synthetic oligonucleotide
gctgggtccctgttgcttc

SEQ ID NO: 6982 - DNA, 19 bp, Artificial Sequence
  Description of Artificial Sequence: Synthetic oligonucleotide
ctgggtccctgttgcttcc

SEQ ID NO: 6983 - DNA, 19 bp, Artificial Sequence
  Description of Artificial Sequence: Synthetic oligonucleotide
tgggtccctgttgcttcct

SEQ ID NO: 6984 - DNA, 19 bp, Artificial Sequence
  Description of Artificial Sequence: Synthetic oligonucleotide
gggtccctgttgcttcctg

SEQ ID NO: 6985 - DNA, 19 bp, Artificial Sequence
  Description of Artificial Sequence: Synthetic oligonucleotide
ggtccctgttgcttcctgc

SEQ ID NO: 6986 - DNA, 19 bp, Artificial Sequence
  Description of Artificial Sequence: Synthetic oligonucleotide
gtccctgttgcttcctgcc

SEQ ID NO: 6987 - DNA, 19 bp, Artificial Sequence
  Description of Artificial Sequence: Synthetic oligonucleotide
tccctgttgcttcctgcct

SEQ ID NO: 6988 - DNA, 19 bp, Artificial Sequence
  Description of Artificial Sequence: Synthetic oligonucleotide
ccctgttgcttcctgcctt

SEQ ID NO: 6989 - DNA, 19 bp, Artificial Sequence
  Description of Artificial Sequence: Synthetic oligonucleotide
cctgttgcttcctgccttt

SEQ ID NO: 6990 - DNA, 19 bp, Artificial Sequence
  Description of Artificial Sequence: Synthetic oligonucleotide
ctgttgcttcctgcctttg

SEQ ID NO: 6991 - DNA, 19 bp, Artificial Sequence
  Description of Artificial Sequence: Synthetic oligonucleotide
tgttgcttcctgcctttgt

SEQ ID NO: 6992 - DNA, 19 bp, Artificial Sequence
  Description of Artificial Sequence: Synthetic oligonucleotide
gttgcttcctgcctttgtc

SEQ ID NO: 6993 - DNA, 19 bp, Artificial Sequence
  Description of Artificial Sequence: Synthetic oligonucleotide
ttgcttcctgcctttgtca

SEQ ID NO: 6994 - DNA, 19 bp, Artificial Sequence
  Description of Artificial Sequence: Synthetic oligonucleotide
tgcttcctgcctttgtcag

SEQ ID NO: 6995 - DNA, 19 bp, Artificial Sequence
  Description of Artificial Sequence: Synthetic oligonucleotide
gcttcctgcctttgtcagc

SEQ ID NO: 6996 - DNA, 19 bp, Artificial Sequence
  Description of Artificial Sequence: Synthetic oligonucleotide
cttcctgcctttgtcagcc

SEQ ID NO: 6997 - DNA, 19 bp, Artificial Sequence
  Description of Artificial Sequence: Synthetic oligonucleotide
ttcctgcctttgtcagcct

SEQ ID NO: 6998 - DNA, 19 bp, Artificial Sequence
  Description of Artificial Sequence: Synthetic oligonucleotide
tcctgcctttgtcagcctt

SEQ ID NO: 6999 - DNA, 19 bp, Artificial Sequence
  Description of Artificial Sequence: Synthetic oligonucleotide
cctgcctttgtcagccttt

SEQ ID NO: 7000 - DNA, 19 bp, Artificial Sequence
  Description of Artificial Sequence: Synthetic oligonucleotide
ctgcctttgtcagcctttg

SEQ ID NO: 7001 - DNA, 19 bp, Artificial Sequence
  Description of Artificial Sequence: Synthetic oligonucleotide
tgcctttgtcagcctttgg

SEQ ID NO: 7002 - DNA, 19 bp, Artificial Sequence
  Description of Artificial Sequence: Synthetic oligonucleotide
gcctttgtcagcctttgga

SEQ ID NO: 7003 - DNA, 19 bp, Artificial Sequence
  Description of Artificial Sequence: Synthetic oligonucleotide
cctttgtcagcctttggac

SEQ ID NO: 7004 - DNA, 19 bp, Artificial Sequence
  Description of Artificial Sequence: Synthetic oligonucleotide
ctttgtcagcctttggact

SEQ ID NO: 7005 - DNA, 19 bp, Artificial Sequence
  Description of Artificial Sequence: Synthetic oligonucleotide
tttgtcagcctttggactc

SEQ ID NO: 7006 - DNA, 19 bp, Artificial Sequence
  Description of Artificial Sequence: Synthetic oligonucleotide
ttgtcagcctttggactct

SEQ ID NO: 7007 - DNA, 19 bp, Artificial Sequence
  Description of Artificial Sequence: Synthetic oligonucleotide
tgtcagcctttggactctc

SEQ ID NO: 7008 - DNA, 19 bp, Artificial Sequence
  Description of Artificial Sequence: Synthetic oligonucleotide
gtcagcctttggactctcc

SEQ ID NO: 7009 - DNA, 19 bp, Artificial Sequence
  Description of Artificial Sequence: Synthetic oligonucleotide
tcagcctttggactctccc

SEQ ID NO: 7010 - DNA, 19 bp, Artificial Sequence
  Description of Artificial Sequence: Synthetic oligonucleotide
cagcctttggactctccca

SEQ ID NO: 7011 - DNA, 19 bp, Artificial Sequence
  Description of Artificial Sequence: Synthetic oligonucleotide
agcctttggactctcccac

SEQ ID NO: 7012 - DNA, 19 bp, Artificial Sequence
  Description of Artificial Sequence: Synthetic oligonucleotide
gcctttggactctcccaca

SEQ ID NO: 7013 - DNA, 19 bp, Artificial Sequence
  Description of Artificial Sequence: Synthetic oligonucleotide
cctttggactctcccacat

SEQ ID NO: 7014 - DNA, 19 bp, Artificial Sequence
  Description of Artificial Sequence: Synthetic oligonucleotide
ctttggactctcccacatt

SEQ ID NO: 7015 - DNA, 19 bp, Artificial Sequence
  Description of Artificial Sequence: Synthetic oligonucleotide
tttggactctcccacattg

SEQ ID NO: 7016 - DNA, 19 bp, Artificial Sequence
  Description of Artificial Sequence: Synthetic oligonucleotide
ttggactctcccacattgg

SEQ ID NO: 7017 - DNA, 19 bp, Artificial Sequence
  Description of Artificial Sequence: Synthetic oligonucleotide
tggactctcccacattggc

SEQ ID NO: 7018 - DNA, 19 bp, Artificial Sequence
  Description of Artificial Sequence: Synthetic oligonucleotide
ggactctcccacattggcg

SEQ ID NO: 7019 - DNA, 19 bp, Artificial Sequence
  Description of Artificial Sequence: Synthetic oligonucleotide
gactctcccacattggcgc

SEQ ID NO: 7020 - DNA, 19 bp, Artificial Sequence
  Description of Artificial Sequence: Synthetic oligonucleotide
actctcccacattggcgca

SEQ ID NO: 7021 - DNA, 19 bp, Artificial Sequence
  Description of Artificial Sequence: Synthetic oligonucleotide
ctctcccacattggcgcat

SEQ ID NO: 7022 - DNA, 19 bp, Artificial Sequence
  Description of Artificial Sequence: Synthetic oligonucleotide
tctcccacattggcgcatc

SEQ ID NO: 7023 - DNA, 19 bp, Artificial Sequence
  Description of Artificial Sequence: Synthetic oligonucleotide
ctcccacattggcgcatcc

SEQ ID NO: 7024 - DNA, 19 bp, Artificial Sequence
  Description of Artificial Sequence: Synthetic oligonucleotide
tcccacattggcgcatcct

SEQ ID NO: 7025 - DNA, 19 bp, Artificial Sequence
  Description of Artificial Sequence: Synthetic oligonucleotide
cccacattggcgcatcctc

SEQ ID NO: 7026 - DNA, 19 bp, Artificial Sequence
  Description of Artificial Sequence: Synthetic oligonucleotide
ccacattggcgcatcctca

SEQ ID NO: 7027 - DNA, 19 bp, Artificial Sequence
  Description of Artificial Sequence: Synthetic oligonucleotide
cacattggcgcatcctcag

SEQ ID NO: 7028 - DNA, 19 bp, Artificial Sequence
  Description of Artificial Sequence: Synthetic oligonucleotide
acattggcgcatcctcaga

SEQ ID NO: 7029 - DNA, 19 bp, Artificial Sequence
  Description of Artificial Sequence: Synthetic oligonucleotide
cattggcgcatcctcagat

SEQ ID NO: 7030 - DNA, 19 bp, Artificial Sequence
  Description of Artificial Sequence: Synthetic oligonucleotide
attggcgcatcctcagata

SEQ ID NO: 7031 - DNA, 19 bp, Artificial Sequence
  Description of Artificial Sequence: Synthetic oligonucleotide
ttggcgcatcctcagatag

SEQ ID NO: 7032 - DNA, 19 bp, Artificial Sequence
  Description of Artificial Sequence: Synthetic oligonucleotide
tggcgcatcctcagataga

SEQ ID NO: 7033 - DNA, 19 bp, Artificial Sequence
  Description of Artificial Sequence: Synthetic oligonucleotide
ggcgcatcctcagatagaa

SEQ ID NO: 7034 - DNA, 19 bp, Artificial Sequence
  Description of Artificial Sequence: Synthetic oligonucleotide
gcgcatcctcagatagaag

SEQ ID NO: 7035 - DNA, 19 bp, Artificial Sequence
  Description of Artificial Sequence: Synthetic oligonucleotide
cgcatcctcagatagaaga

SEQ ID NO: 7036 - DNA, 19 bp, Artificial Sequence
  Description of Artificial Sequence: Synthetic oligonucleotide
gcatcctcagatagaagac

SEQ ID NO: 7037 - DNA, 19 bp, Artificial Sequence
  Description of Artificial Sequence: Synthetic oligonucleotide
catcctcagatagaagaca

SEQ ID NO: 7038 - DNA, 19 bp, Artificial Sequence
  Description of Artificial Sequence: Synthetic oligonucleotide
atcctcagatagaagacat

SEQ ID NO: 7039 - DNA, 19 bp, Artificial Sequence
  Description of Artificial Sequence: Synthetic oligonucleotide
tcctcagatagaagacatt

SEQ ID NO: 7040 - DNA, 19 bp, Artificial Sequence
  Description of Artificial Sequence: Synthetic oligonucleotide
cctcagatagaagacattt

SEQ ID NO: 7041 - DNA, 19 bp, Artificial Sequence
  Description of Artificial Sequence: Synthetic oligonucleotide
ctcagatagaagacatttc

SEQ ID NO: 7042 - DNA, 19 bp, Artificial Sequence
  Description of Artificial Sequence: Synthetic oligonucleotide
tcagatagaagacatttcc

SEQ ID NO: 7043 - DNA, 19 bp, Artificial Sequence
  Description of Artificial Sequence: Synthetic oligonucleotide
cagatagaagacatttcct

SEQ ID NO: 7044 - DNA, 19 bp, Artificial Sequence
  Description of Artificial Sequence: Synthetic oligonucleotide
agatagaagacatttcctg

SEQ ID NO: 7045 - DNA, 19 bp, Artificial Sequence
  Description of Artificial Sequence: Synthetic oligonucleotide
gatagaagacatttcctga

SEQ ID NO: 7046 - DNA, 19 bp, Artificial Sequence
  Description of Artificial Sequence: Synthetic oligonucleotide
atagaagacatttcctgaa

SEQ ID NO: 7047 - DNA, 19 bp, Artificial Sequence
  Description of Artificial Sequence: Synthetic oligonucleotide
tagaagacatttcctgaac

SEQ ID NO: 7048 - DNA, 19 bp, Artificial Sequence
  Description of Artificial Sequence: Synthetic oligonucleotide
agaagacatttcctgaacc

SEQ ID NO: 7049 - DNA, 19 bp, Artificial Sequence
  Description of Artificial Sequence: Synthetic oligonucleotide
gaagacatttcctgaacca

SEQ ID NO: 7050 - DNA, 19 bp, Artificial Sequence
  Description of Artificial Sequence: Synthetic oligonucleotide
aagacatttcctgaaccaa

SEQ ID NO: 7051 - DNA, 19 bp, Artificial Sequence
  Description of Artificial Sequence: Synthetic oligonucleotide
agacatttcctgaaccaag

SEQ ID NO: 7052 - DNA, 19 bp, Artificial Sequence
  Description of Artificial Sequence: Synthetic oligonucleotide
gacatttcctgaaccaaga

SEQ ID NO: 7053 - DNA, 19 bp, Artificial Sequence
  Description of Artificial Sequence: Synthetic oligonucleotide
acatttcctgaaccaagac

SEQ ID NO: 7054 - DNA, 19 bp, Artificial Sequence
  Description of Artificial Sequence: Synthetic oligonucleotide
catttcctgaaccaagact

SEQ ID NO: 7055 - DNA, 19 bp, Artificial Sequence
  Description of Artificial Sequence: Synthetic oligonucleotide
atttcctgaaccaagactc

SEQ ID NO: 7056 - DNA, 19 bp, Artificial Sequence
  Description of Artificial Sequence: Synthetic oligonucleotide
tttcctgaaccaagactct

SEQ ID NO: 7057 - DNA, 19 bp, Artificial Sequence
  Description of Artificial Sequence: Synthetic oligonucleotide
ttcctgaaccaagactctt

SEQ ID NO: 7058 - DNA, 19 bp, Artificial Sequence
  Description of Artificial Sequence: Synthetic oligonucleotide
tcctgaaccaagactcttt

SEQ ID NO: 7059 - DNA, 19 bp, Artificial Sequence
  Description of Artificial Sequence: Synthetic oligonucleotide
cctgaaccaagactcttta

SEQ ID NO: 7060 - DNA, 19 bp, Artificial Sequence
  Description of Artificial Sequence: Synthetic oligonucleotide
ctgaaccaagactctttac

SEQ ID NO: 7061 - DNA, 19 bp, Artificial Sequence
  Description of Artificial Sequence: Synthetic oligonucleotide
tgaaccaagactctttacc

SEQ ID NO: 7062 - DNA, 19 bp, Artificial Sequence
  Description of Artificial Sequence: Synthetic oligonucleotide
gaaccaagactctttaccg

SEQ ID NO: 7063 - DNA, 19 bp, Artificial Sequence
  Description of Artificial Sequence: Synthetic oligonucleotide
aaccaagactctttaccgt

SEQ ID NO: 7064 - DNA, 19 bp, Artificial Sequence
  Description of Artificial Sequence: Synthetic oligonucleotide
accaagactctttaccgtg

SEQ ID NO: 7065 - DNA, 19 bp, Artificial Sequence
  Description of Artificial Sequence: Synthetic oligonucleotide
ccaagactctttaccgtgt

SEQ ID NO: 7066 - DNA, 19 bp, Artificial Sequence
  Description of Artificial Sequence: Synthetic oligonucleotide
caagactctttaccgtgta

SEQ ID NO: 7067 - DNA, 19 bp, Artificial Sequence
  Description of Artificial Sequence: Synthetic oligonucleotide
aagactctttaccgtgtat

SEQ ID NO: 7068 - DNA, 19 bp, Artificial Sequence
  Description of Artificial Sequence: Synthetic oligonucleotide
agactctttaccgtgtatg

SEQ ID NO: 7069 - DNA, 19 bp, Artificial Sequence
  Description of Artificial Sequence: Synthetic oligonucleotide
gactctttaccgtgtatga

SEQ ID NO: 7070 - DNA, 19 bp, Artificial Sequence
  Description of Artificial Sequence: Synthetic oligonucleotide
actctttaccgtgtatgac

SEQ ID NO: 7071 - DNA, 19 bp, Artificial Sequence
  Description of Artificial Sequence: Synthetic oligonucleotide
ctctttaccgtgtatgact

SEQ ID NO: 7072 - DNA, 19 bp, Artificial Sequence
  Description of Artificial Sequence: Synthetic oligonucleotide
tctttaccgtgtatgactt

SEQ ID NO: 7073 - DNA, 19 bp, Artificial Sequence
  Description of Artificial Sequence: Synthetic oligonucleotide
ctttaccgtgtatgacttt

SEQ ID NO: 7074 - DNA, 19 bp, Artificial Sequence
  Description of Artificial Sequence: Synthetic oligonucleotide
tttaccgtgtatgactttc

SEQ ID NO: 7075 - DNA, 19 bp, Artificial Sequence
  Description of Artificial Sequence: Synthetic oligonucleotide
ttaccgtgtatgactttcc

SEQ ID NO: 7076 - DNA, 19 bp, Artificial Sequence
  Description of Artificial Sequence: Synthetic oligonucleotide
taccgtgtatgactttcct

SEQ ID NO: 7077 - DNA, 19 bp, Artificial Sequence
  Description of Artificial Sequence: Synthetic oligonucleotide
accgtgtatgactttcctt

SEQ ID NO: 7078 - DNA, 19 bp, Artificial Sequence
  Description of Artificial Sequence: Synthetic oligonucleotide
ccgtgtatgactttccttc

SEQ ID NO: 7079 - DNA, 19 bp, Artificial Sequence
  Description of Artificial Sequence: Synthetic oligonucleotide
cgtgtatgactttccttca

SEQ ID NO: 7080 - DNA, 19 bp, Artificial Sequence
  Description of Artificial Sequence: Synthetic oligonucleotide
gtgtatgactttccttcac

SEQ ID NO: 7081 - DNA, 19 bp, Artificial Sequence
  Description of Artificial Sequence: Synthetic oligonucleotide
tgtatgactttccttcaca

SEQ ID NO: 7082 - DNA, 19 bp, Artificial Sequence
  Description of Artificial Sequence: Synthetic oligonucleotide
gtatgactttccttcacac

SEQ ID NO: 7083 - DNA, 19 bp, Artificial Sequence
  Description of Artificial Sequence: Synthetic oligonucleotide
tatgactttccttcacaca

SEQ ID NO: 7084 - DNA, 19 bp, Artificial Sequence
  Description of Artificial Sequence: Synthetic oligonucleotide
atgactttccttcacacag

SEQ ID NO: 7085 - DNA, 19 bp, Artificial Sequence
  Description of Artificial Sequence: Synthetic oligonucleotide
tgactttccttcacacaga

SEQ ID NO: 7086 - DNA, 19 bp, Artificial Sequence
  Description of Artificial Sequence: Synthetic oligonucleotide
gactttccttcacacagag

SEQ ID NO: 7087 - DNA, 19 bp, Artificial Sequence
  Description of Artificial Sequence: Synthetic oligonucleotide
actttccttcacacagaga

SEQ ID NO: 7088 - DNA, 19 bp, Artificial Sequence
  Description of Artificial Sequence: Synthetic oligonucleotide
ctttccttcacacagagaa

SEQ ID NO: 7089 - DNA, 19 bp, Artificial Sequence
  Description of Artificial Sequence: Synthetic oligonucleotide
tttccttcacacagagaaa

SEQ ID NO: 7090 - DNA, 19 bp, Artificial Sequence
  Description of Artificial Sequence: Synthetic oligonucleotide
ttccttcacacagagaaag

SEQ ID NO: 7091 - DNA, 19 bp, Artificial Sequence
  Description of Artificial Sequence: Synthetic oligonucleotide
tccttcacacagagaaagg

SEQ ID NO: 7092 - DNA, 19 bp, Artificial Sequence
  Description of Artificial Sequence: Synthetic oligonucleotide
ccttcacacagagaaagga

SEQ ID NO: 7093 - DNA, 19 bp, Artificial Sequence
  Description of Artificial Sequence: Synthetic oligonucleotide
cttcacacagagaaaggac

SEQ ID NO: 7094 - DNA, 19 bp, Artificial Sequence
  Description of Artificial Sequence: Synthetic oligonucleotide
ttcacacagagaaaggaca

SEQ ID NO: 7095 - DNA, 19 bp, Artificial Sequence
  Description of Artificial Sequence: Synthetic oligonucleotide
tcacacagagaaaggacat

SEQ ID NO: 7096 - DNA, 19 bp, Artificial Sequence
  Description of Artificial Sequence: Synthetic oligonucleotide
cacacagagaaaggacatt

SEQ ID NO: 7097 - DNA, 19 bp, Artificial Sequence
  Description of Artificial Sequence: Synthetic oligonucleotide
acacagagaaaggacattg

SEQ ID NO: 7098 - DNA, 19 bp, Artificial Sequence
  Description of Artificial Sequence: Synthetic oligonucleotide
cacagagaaaggacattga

SEQ ID NO: 7099 - DNA, 19 bp, Artificial Sequence
  Description of Artificial Sequence: Synthetic oligonucleotide
acagagaaaggacattgat

SEQ ID NO: 7100 - DNA, 19 bp, Artificial Sequence
  Description of Artificial Sequence: Synthetic oligonucleotide
cagagaaaggacattgatt

SEQ ID NO: 7101 - DNA, 19 bp, Artificial Sequence
  Description of Artificial Sequence: Synthetic oligonucleotide
agagaaaggacattgattc

SEQ ID NO: 7102 - DNA, 19 bp, Artificial Sequence
  Description of Artificial Sequence: Synthetic oligonucleotide
gagaaaggacattgattct

SEQ ID NO: 7103 - DNA, 19 bp, Artificial Sequence
  Description of Artificial Sequence: Synthetic oligonucleotide
agaaaggacattgattctt

SEQ ID NO: 7104 - DNA, 19 bp, Artificial Sequence
  Description of Artificial Sequence: Synthetic oligonucleotide
gaaaggacattgattcttt

SEQ ID NO: 7105 - DNA, 19 bp, Artificial Sequence
  Description of Artificial Sequence: Synthetic oligonucleotide
aaaggacattgattctttt

SEQ ID NO: 7106 - DNA, 19 bp, Artificial Sequence
  Description of Artificial Sequence: Synthetic oligonucleotide
aaggacattgattcttttg

SEQ ID NO: 7107 - DNA, 19 bp, Artificial Sequence
  Description of Artificial Sequence: Synthetic oligonucleotide
aggacattgattcttttga

SEQ ID NO: 7108 - DNA, 19 bp, Artificial Sequence
  Description of Artificial Sequence: Synthetic oligonucleotide
ggacattgattcttttgat

SEQ ID NO: 7109 - DNA, 19 bp, Artificial Sequence
  Description of Artificial Sequence: Synthetic oligonucleotide
gacattgattcttttgatg

SEQ ID NO: 7110 - DNA, 19 bp, Artificial Sequence
  Description of Artificial Sequence: Synthetic oligonucleotide
acattgattcttttgatgc

SEQ ID NO: 7111 - DNA, 19 bp, Artificial Sequence
  Description of Artificial Sequence: Synthetic oligonucleotide
cattgattcttttgatgca

SEQ ID NO: 7112 - DNA, 19 bp, Artificial Sequence
  Description of Artificial Sequence: Synthetic oligonucleotide
attgattcttttgatgcac

SEQ ID NO: 7113 - DNA, 19 bp, Artificial Sequence
  Description of Artificial Sequence: Synthetic oligonucleotide
ttgattcttttgatgcact

SEQ ID NO: 7114 - DNA, 19 bp, Artificial Sequence
  Description of Artificial Sequence: Synthetic oligonucleotide
tgattcttttgatgcactt

SEQ ID NO: 7115 - DNA, 19 bp, Artificial Sequence
  Description of Artificial Sequence: Synthetic oligonucleotide
gattcttttgatgcacttg

SEQ ID NO: 7116 - DNA, 19 bp, Artificial Sequence
  Description of Artificial Sequence: Synthetic oligonucleotide
attcttttgatgcacttga

SEQ ID NO: 7117 - DNA, 19 bp, Artificial Sequence
  Description of Artificial Sequence: Synthetic oligonucleotide
ttcttttgatgcacttgaa

SEQ ID NO: 7118 - DNA, 19 bp, Artificial Sequence
  Description of Artificial Sequence: Synthetic oligonucleotide
tcttttgatgcacttgaat

SEQ ID NO: 7119 - DNA, 19 bp, Artificial Sequence
  Description of Artificial Sequence: Synthetic oligonucleotide
cttttgatgcacttgaatg

SEQ ID NO: 7120 - DNA, 19 bp, Artificial Sequence
  Description of Artificial Sequence: Synthetic oligonucleotide
ttttgatgcacttgaatgc

SEQ ID NO: 7121 - DNA, 19 bp, Artificial Sequence
  Description of Artificial Sequence: Synthetic oligonucleotide
tttgatgcacttgaatgcc

SEQ ID NO: 7122 - DNA, 19 bp, Artificial Sequence
  Description of Artificial Sequence: Synthetic oligonucleotide
ttgatgcacttgaatgcct

SEQ ID NO: 7123 - DNA, 19 bp, Artificial Sequence
  Description of Artificial Sequence: Synthetic oligonucleotide
tgatgcacttgaatgcctt

SEQ ID NO: 7124 - DNA, 19 bp, Artificial Sequence
  Description of Artificial Sequence: Synthetic oligonucleotide
gatgcacttgaatgccttg

SEQ ID NO: 7125 - DNA, 19 bp, Artificial Sequence
  Description of Artificial Sequence: Synthetic oligonucleotide
atgcacttgaatgccttga

SEQ ID NO: 7126 - DNA, 19 bp, Artificial Sequence
  Description of Artificial Sequence: Synthetic oligonucleotide
tgcacttgaatgccttgag

SEQ ID NO: 7127 - DNA, 19 bp, Artificial Sequence
  Description of Artificial Sequence: Synthetic oligonucleotide
gcacttgaatgccttgaga

SEQ ID NO: 7128 - DNA, 19 bp, Artificial Sequence
  Description of Artificial Sequence: Synthetic oligonucleotide
cacttgaatgccttgagac

SEQ ID NO: 7129 - DNA, 19 bp, Artificial Sequence
  Description of Artificial Sequence: Synthetic oligonucleotide
acttgaatgccttgagacc

SEQ ID NO: 7130 - DNA, 19 bp, Artificial Sequence
  Description of Artificial Sequence: Synthetic oligonucleotide
cttgaatgccttgagacct

SEQ ID NO: 7131 - DNA, 19 bp, Artificial Sequence
  Description of Artificial Sequence: Synthetic oligonucleotide
ttgaatgccttgagacctg

SEQ ID NO: 7132 - DNA, 19 bp, Artificial Sequence
  Description of Artificial Sequence: Synthetic oligonucleotide
tgaatgccttgagacctgc

SEQ ID NO: 7133 - DNA, 19 bp, Artificial Sequence
  Description of Artificial Sequence: Synthetic oligonucleotide
gaatgccttgagacctgcc

SEQ ID NO: 7134 - DNA, 19 bp, Artificial Sequence
  Description of Artificial Sequence: Synthetic oligonucleotide
aatgccttgagacctgccg

SEQ ID NO: 7135 - DNA, 19 bp, Artificial Sequence
  Description of Artificial Sequence: Synthetic oligonucleotide
atgccttgagacctgccgt

SEQ ID NO: 7136 - DNA, 19 bp, Artificial Sequence
  Description of Artificial Sequence: Synthetic oligonucleotide
tgccttgagacctgccgtt

SEQ ID NO: 7137 - DNA, 19 bp, Artificial Sequence
  Description of Artificial Sequence: Synthetic oligonucleotide
gccttgagacctgccgttg

SEQ ID NO: 7138 - DNA, 19 bp, Artificial Sequence
  Description of Artificial Sequence: Synthetic oligonucleotide
ccttgagacctgccgttgc

SEQ ID NO: 7139 - DNA, 19 bp, Artificial Sequence
  Description of Artificial Sequence: Synthetic oligonucleotide
cttgagacctgccgttgcc

SEQ ID NO: 7140 - DNA, 19 bp, Artificial Sequence
  Description of Artificial Sequence: Synthetic oligonucleotide
ttgagacctgccgttgcct

SEQ ID NO: 7141 - DNA, 19 bp, Artificial Sequence
  Description of Artificial Sequence: Synthetic oligonucleotide
tgagacctgccgttgcctc

SEQ ID NO: 7142 - DNA, 19 bp, Artificial Sequence
  Description of Artificial Sequence: Synthetic oligonucleotide
gagacctgccgttgcctct

SEQ ID NO: 7143 - DNA, 19 bp, Artificial Sequence
  Description of Artificial Sequence: Synthetic oligonucleotide
agacctgccgttgcctctc

SEQ ID NO: 7144 - DNA, 19 bp, Artificial Sequence
  Description of Artificial Sequence: Synthetic oligonucleotide
gacctgccgttgcctctcc

SEQ ID NO: 7145 - DNA, 19 bp, Artificial Sequence
  Description of Artificial Sequence: Synthetic oligonucleotide
acctgccgttgcctctcct

SEQ ID NO: 7146 - DNA, 19 bp, Artificial Sequence
  Description of Artificial Sequence: Synthetic oligonucleotide
cctgccgttgcctctcctc

SEQ ID NO: 7147 - DNA, 19 bp, Artificial Sequence
  Description of Artificial Sequence: Synthetic oligonucleotide
ctgccgttgcctctcctct

SEQ ID NO: 7148 - DNA, 19 bp, Artificial Sequence
  Description of Artificial Sequence: Synthetic oligonucleotide
tgccgttgcctctcctctc

SEQ ID NO: 7149 - DNA, 19 bp, Artificial Sequence
  Description of Artificial Sequence: Synthetic oligonucleotide
gccgttgcctctcctctcc

SEQ ID NO: 7150 - DNA, 19 bp, Artificial Sequence
  Description of Artificial Sequence: Synthetic oligonucleotide
ccgttgcctctcctctccc

SEQ ID NO: 7151 - DNA, 19 bp, Artificial Sequence
  Description of Artificial Sequence: Synthetic oligonucleotide
cgttgcctctcctctcccc

SEQ ID NO: 7152 - DNA, 19 bp, Artificial Sequence
  Description of Artificial Sequence: Synthetic oligonucleotide
gttgcctctcctctcccca

SEQ ID NO: 7153 - DNA, 19 bp, Artificial Sequence
  Description of Artificial Sequence: Synthetic oligonucleotide
ttgcctctcctctccccac

SEQ ID NO: 7154 - DNA, 19 bp, Artificial Sequence
  Description of Artificial Sequence: Synthetic oligonucleotide
tgcctctcctctccccacc

SEQ ID NO: 7155 - DNA, 19 bp, Artificial Sequence
  Description of Artificial Sequence: Synthetic oligonucleotide
gcctctcctctccccacct

SEQ ID NO: 7156 - DNA, 19 bp, Artificial Sequence
  Description of Artificial Sequence: Synthetic oligonucleotide
cctctcctctccccacctc

SEQ ID NO: 7157 - DNA, 19 bp, Artificial Sequence
  Description of Artificial Sequence: Synthetic oligonucleotide
ctctcctctccccacctct

SEQ ID NO: 7158 - DNA, 19 bp, Artificial Sequence
  Description of Artificial Sequence: Synthetic oligonucleotide
tctcctctccccacctctt

SEQ ID NO: 7159 - DNA, 19 bp, Artificial Sequence
  Description of Artificial Sequence: Synthetic oligonucleotide
ctcctctccccacctcttc

SEQ ID NO: 7160 - DNA, 19 bp, Artificial Sequence
  Description of Artificial Sequence: Synthetic oligonucleotide
tcctctccccacctcttcc

SEQ ID NO: 7161 - DNA, 19 bp, Artificial Sequence
  Description of Artificial Sequence: Synthetic oligonucleotide
cctctccccacctcttcca

SEQ ID NO: 7162 - DNA, 19 bp, Artificial Sequence
  Description of Artificial Sequence: Synthetic oligonucleotide
ctctccccacctcttccag

SEQ ID NO: 7163 - DNA, 19 bp, Artificial Sequence
  Description of Artificial Sequence: Synthetic oligonucleotide
tctccccacctcttccagc

SEQ ID NO: 7164 - DNA, 19 bp, Artificial Sequence
  Description of Artificial Sequence: Synthetic oligonucleotide
ctccccacctcttccagcc

SEQ ID NO: 7165 - DNA, 19 bp, Artificial Sequence
  Description of Artificial Sequence: Synthetic oligonucleotide
tccccacctcttccagcct

SEQ ID NO: 7166 - DNA, 19 bp, Artificial Sequence
  Description of Artificial Sequence: Synthetic oligonucleotide
ccccacctcttccagcctc

SEQ ID NO: 7167 - DNA, 19 bp, Artificial Sequence
  Description of Artificial Sequence: Synthetic oligonucleotide
cccacctcttccagcctct

SEQ ID NO: 7168 - DNA, 19 bp, Artificial Sequence
  Description of Artificial Sequence: Synthetic oligonucleotide
ccacctcttccagcctctg

SEQ ID NO: 7169 - DNA, 19 bp, Artificial Sequence
  Description of Artificial Sequence: Synthetic oligonucleotide
cacctcttccagcctctgc

SEQ ID NO: 7170 - DNA, 19 bp, Artificial Sequence
  Description of Artificial Sequence: Synthetic oligonucleotide
acctcttccagcctctgcg

SEQ ID NO: 7171 - DNA, 19 bp, Artificial Sequence
  Description of Artificial Sequence: Synthetic oligonucleotide
cctcttccagcctctgcgc

SEQ ID NO: 7172 - DNA, 19 bp, Artificial Sequence
  Description of Artificial Sequence: Synthetic oligonucleotide
ctcttccagcctctgcgcc

SEQ ID NO: 7173 - DNA, 19 bp, Artificial Sequence
  Description of Artificial Sequence: Synthetic oligonucleotide
tcttccagcctctgcgcca

SEQ ID NO: 7174 - DNA, 19 bp, Artificial Sequence
  Description of Artificial Sequence: Synthetic oligonucleotide
cttccagcctctgcgccat

SEQ ID NO: 7175 - DNA, 19 bp, Artificial Sequence
  Description of Artificial Sequence: Synthetic oligonucleotide
ttccagcctctgcgccatg

SEQ ID NO: 7176 - DNA, 19 bp, Artificial Sequence
  Description of Artificial Sequence: Synthetic oligonucleotide
tccagcctctgcgccatga

SEQ ID NO: 7177 - DNA, 19 bp, Artificial Sequence
  Description of Artificial Sequence: Synthetic oligonucleotide
ccagcctctgcgccatgag

SEQ ID NO: 7178 - DNA, 19 bp, Artificial Sequence
  Description of Artificial Sequence: Synthetic oligonucleotide
cagcctctgcgccatgagc

SEQ ID NO: 7179 - DNA, 19 bp, Artificial Sequence
  Description of Artificial Sequence: Synthetic oligonucleotide
agcctctgcgccatgagca

SEQ ID NO: 7180 - DNA, 19 bp, Artificial Sequence
  Description of Artificial Sequence: Synthetic oligonucleotide
gcctctgcgccatgagcag

SEQ ID NO: 7181 - DNA, 19 bp, Artificial Sequence
  Description of Artificial Sequence: Synthetic oligonucleotide
cctctgcgccatgagcagt

SEQ ID NO: 7182 - DNA, 19 bp, Artificial Sequence
  Description of Artificial Sequence: Synthetic oligonucleotide
ctctgcgccatgagcagtg

SEQ ID NO: 7183 - DNA, 19 bp, Artificial Sequence
  Description of Artificial Sequence: Synthetic oligonucleotide
tctgcgccatgagcagtgt

SEQ ID NO: 7184 - DNA, 19 bp, Artificial Sequence
  Description of Artificial Sequence: Synthetic oligonucleotide
ctgcgccatgagcagtgtg

SEQ ID NO: 7185 - DNA, 19 bp, Artificial Sequence
  Description of Artificial Sequence: Synthetic oligonucleotide
tgcgccatgagcagtgtgt

SEQ ID NO: 7186 - DNA, 19 bp, Artificial Sequence
  Description of Artificial Sequence: Synthetic oligonucleotide
gcgccatgagcagtgtgtt

SEQ ID NO: 7187 - DNA, 19 bp, Artificial Sequence
  Description of Artificial Sequence: Synthetic oligonucleotide
cgccatgagcagtgtgttt

SEQ ID NO: 7188 - DNA, 19 bp, Artificial Sequence
  Description of Artificial Sequence: Synthetic oligonucleotide
gccatgagcagtgtgtttg

SEQ ID NO: 7189 - DNA, 19 bp, Artificial Sequence
  Description of Artificial Sequence: Synthetic oligonucleotide
ccatgagcagtgtgtttga

SEQ ID NO: 7190 - DNA, 19 bp, Artificial Sequence
  Description of Artificial Sequence: Synthetic oligonucleotide
catgagcagtgtgtttgaa

SEQ ID NO: 7191 - DNA, 19 bp, Artificial Sequence
  Description of Artificial Sequence: Synthetic oligonucleotide
atgagcagtgtgtttgaag

SEQ ID NO: 7192 - DNA, 19 bp, Artificial Sequence
  Description of Artificial Sequence: Synthetic oligonucleotide
tgagcagtgtgtttgaagt

SEQ ID NO: 7193 - DNA, 19 bp, Artificial Sequence
  Description of Artificial Sequence: Synthetic oligonucleotide
gagcagtgtgtttgaagtt

SEQ ID NO: 7194 - DNA, 19 bp, Artificial Sequence
  Description of Artificial Sequence: Synthetic oligonucleotide
agcagtgtgtttgaagttt

SEQ ID NO: 7195 - DNA, 19 bp, Artificial Sequence
  Description of Artificial Sequence: Synthetic oligonucleotide
gcagtgtgtttgaagtttc

SEQ ID NO: 7196 - DNA, 19 bp, Artificial Sequence
  Description of Artificial Sequence: Synthetic oligonucleotide
cagtgtgtttgaagtttca

SEQ ID NO: 7197 - DNA, 19 bp, Artificial Sequence
  Description of Artificial Sequence: Synthetic oligonucleotide
agtgtgtttgaagtttcag

SEQ ID NO: 7198 - DNA, 19 bp, Artificial Sequence
  Description of Artificial Sequence: Synthetic oligonucleotide
gtgtgtttgaagtttcagc

SEQ ID NO: 7199 - DNA, 19 bp, Artificial Sequence
  Description of Artificial Sequence: Synthetic oligonucleotide
tgtgtttgaagtttcagct

SEQ ID NO: 7200 - DNA, 19 bp, Artificial Sequence
  Description of Artificial Sequence: Synthetic oligonucleotide
gtgtttgaagtttcagctt

SEQ ID NO: 7201 - DNA, 19 bp, Artificial Sequence
  Description of Artificial Sequence: Synthetic oligonucleotide
tgtttgaagtttcagcttt

SEQ ID NO: 7202 - DNA, 19 bp, Artificial Sequence
  Description of Artificial Sequence: Synthetic oligonucleotide
gtttgaagtttcagctttg

SEQ ID NO: 7203 - DNA, 19 bp, Artificial Sequence
  Description of Artificial Sequence: Synthetic oligonucleotide
tttgaagtttcagctttga

SEQ ID NO: 7204 - DNA, 19 bp, Artificial Sequence
  Description of Artificial Sequence: Synthetic oligonucleotide
ttgaagtttcagctttgaa

SEQ ID NO: 7205 - DNA, 19 bp, Artificial Sequence
  Description of Artificial Sequence: Synthetic oligonucleotide
tgaagtttcagctttgaat

SEQ ID NO: 7206 - DNA, 19 bp, Artificial Sequence
  Description of Artificial Sequence: Synthetic oligonucleotide
gaagtttcagctttgaatg

SEQ ID NO: 7207 - DNA, 19 bp, Artificial Sequence
  Description of Artificial Sequence: Synthetic oligonucleotide
aagtttcagctttgaatgt

SEQ ID NO: 7208 - DNA, 19 bp, Artificial Sequence
  Description of Artificial Sequence: Synthetic oligonucleotide
agtttcagctttgaatgtc

SEQ ID NO: 7209 - DNA, 19 bp, Artificial Sequence
  Description of Artificial Sequence: Synthetic oligonucleotide
gtttcagctttgaatgtct

SEQ ID NO: 7210 - DNA, 19 bp, Artificial Sequence
  Description of Artificial Sequence: Synthetic oligonucleotide
tttcagctttgaatgtctt

SEQ ID NO: 7211 - DNA, 19 bp, Artificial Sequence
  Description of Artificial Sequence: Synthetic oligonucleotide
ttcagctttgaatgtcttc

SEQ ID NO: 7212 - DNA, 19 bp, Artificial Sequence
  Description of Artificial Sequence: Synthetic oligonucleotide
tcagctttgaatgtcttcc

SEQ ID NO: 7213 - DNA, 19 bp, Artificial Sequence
  Description of Artificial Sequence: Synthetic oligonucleotide
cagctttgaatgtcttccc

SEQ ID NO: 7214 - DNA, 19 bp, Artificial Sequence
  Description of Artificial Sequence: Synthetic oligonucleotide
agctttgaatgtcttcccg

SEQ ID NO: 7215 - DNA, 19 bp, Artificial Sequence
  Description of Artificial Sequence: Synthetic oligonucleotide
gctttgaatgtcttcccgc

SEQ ID NO: 7216 - DNA, 19 bp, Artificial Sequence
  Description of Artificial Sequence: Synthetic oligonucleotide
ctttgaatgtcttcccgcc

SEQ ID NO: 7217 - DNA, 19 bp, Artificial Sequence
  Description of Artificial Sequence: Synthetic oligonucleotide
tttgaatgtcttcccgccc

SEQ ID NO: 7218 - DNA, 19 bp, Artificial Sequence
  Description of Artificial Sequence: Synthetic oligonucleotide
ttgaatgtcttcccgcccg

SEQ ID NO: 7219 - DNA, 19 bp, Artificial Sequence
  Description of Artificial Sequence: Synthetic oligonucleotide
tgaatgtcttcccgcccga

SEQ ID NO: 7220 - DNA, 19 bp, Artificial Sequence
  Description of Artificial Sequence: Synthetic oligonucleotide
gaatgtcttcccgcccgat

SEQ ID NO: 7221 - DNA, 19 bp, Artificial Sequence
  Description of Artificial Sequence: Synthetic oligonucleotide
aatgtcttcccgcccgatc

SEQ ID NO: 7222 - DNA, 19 bp, Artificial Sequence
  Description of Artificial Sequence: Synthetic oligonucleotide
atgtcttcccgcccgatcc

SEQ ID NO: 7223 - DNA, 19 bp, Artificial Sequence
  Description of Artificial Sequence: Synthetic oligonucleotide
tgtcttcccgcccgatccg

SEQ ID NO: 7224 - DNA, 19 bp, Artificial Sequence
  Description of Artificial Sequence: Synthetic oligonucleotide
gtcttcccgcccgatccgt

SEQ ID NO: 7225 - DNA, 19 bp, Artificial Sequence
  Description of Artificial Sequence: Synthetic oligonucleotide
tcttcccgcccgatccgtg

SEQ ID NO: 7226 - DNA, 19 bp, Artificial Sequence
  Description of Artificial Sequence: Synthetic oligonucleotide
cttcccgcccgatccgtgg

SEQ ID NO: 7227 - DNA, 19 bp, Artificial Sequence
  Description of Artificial Sequence: Synthetic oligonucleotide
ttcccgcccgatccgtggc

SEQ ID NO: 7228 - DNA, 19 bp, Artificial Sequence
  Description of Artificial Sequence: Synthetic oligonucleotide
tcccgcccgatccgtggcc

SEQ ID NO: 7229 - DNA, 19 bp, Artificial Sequence
  Description of Artificial Sequence: Synthetic oligonucleotide
cccgcccgatccgtggcct

SEQ ID NO: 7230 - DNA, 19 bp, Artificial Sequence
  Description of Artificial Sequence: Synthetic oligonucleotide
ccgcccgatccgtggcctg

SEQ ID NO: 7231 - DNA, 19 bp, Artificial Sequence
  Description of Artificial Sequence: Synthetic oligonucleotide
cgcccgatccgtggcctga

SEQ ID NO: 7232 - DNA, 19 bp, Artificial Sequence
  Description of Artificial Sequence: Synthetic oligonucleotide
gcccgatccgtggcctgag

SEQ ID NO: 7233 - DNA, 19 bp, Artificial Sequence
  Description of Artificial Sequence: Synthetic oligonucleotide
cccgatccgtggcctgaga

SEQ ID NO: 7234 - DNA, 19 bp, Artificial Sequence
  Description of Artificial Sequence: Synthetic oligonucleotide
ccgatccgtggcctgagaa

SEQ ID NO: 7235 - DNA, 19 bp, Artificial Sequence
  Description of Artificial Sequence: Synthetic oligonucleotide
cgatccgtggcctgagaac

SEQ ID NO: 7236 - DNA, 19 bp, Artificial Sequence
  Description of Artificial Sequence: Synthetic oligonucleotide
gatccgtggcctgagaact

SEQ ID NO: 7237 - DNA, 19 bp, Artificial Sequence
  Description of Artificial Sequence: Synthetic oligonucleotide
atccgtggcctgagaactt

SEQ ID NO: 7238 - DNA, 19 bp, Artificial Sequence
  Description of Artificial Sequence: Synthetic oligonucleotide
tccgtggcctgagaacttc

SEQ ID NO: 7239 - DNA, 19 bp, Artificial Sequence
  Description of Artificial Sequence: Synthetic oligonucleotide
ccgtggcctgagaacttca

SEQ ID NO: 7240 - DNA, 19 bp, Artificial Sequence
  Description of Artificial Sequence: Synthetic oligonucleotide
cgtggcctgagaacttcat

SEQ ID NO: 7241 - DNA, 19 bp, Artificial Sequence
  Description of Artificial Sequence: Synthetic oligonucleotide
gtggcctgagaacttcata

SEQ ID NO: 7242 - DNA, 19 bp, Artificial Sequence
  Description of Artificial Sequence: Synthetic oligonucleotide
tggcctgagaacttcatag

SEQ ID NO: 7243 - DNA, 19 bp, Artificial Sequence
  Description of Artificial Sequence: Synthetic oligonucleotide
ggcctgagaacttcataga

SEQ ID NO: 7244 - DNA, 19 bp, Artificial Sequence
  Description of Artificial Sequence: Synthetic oligonucleotide
gcctgagaacttcatagag

SEQ ID NO: 7245 - DNA, 19 bp, Artificial Sequence
  Description of Artificial Sequence: Synthetic oligonucleotide
cctgagaacttcatagagg

SEQ ID NO: 7246 - DNA, 19 bp, Artificial Sequence
  Description of Artificial Sequence: Synthetic oligonucleotide
ctgagaacttcatagaggt

SEQ ID NO: 7247 - DNA, 19 bp, Artificial Sequence
  Description of Artificial Sequence: Synthetic oligonucleotide
tgagaacttcatagaggtg

SEQ ID NO: 7248 - DNA, 19 bp, Artificial Sequence
  Description of Artificial Sequence: Synthetic oligonucleotide
gagaacttcatagaggtgt

SEQ ID NO: 7249 - DNA, 19 bp, Artificial Sequence
  Description of Artificial Sequence: Synthetic oligonucleotide
agaacttcatagaggtgtg

SEQ ID NO: 7250 - DNA, 19 bp, Artificial Sequence
  Description of Artificial Sequence: Synthetic oligonucleotide
gaacttcatagaggtgtga

SEQ ID NO: 7251 - DNA, 19 bp, Artificial Sequence
  Description of Artificial Sequence: Synthetic oligonucleotide
aacttcatagaggtgtgat

SEQ ID NO: 7252 - DNA, 19 bp, Artificial Sequence
  Description of Artificial Sequence: Synthetic oligonucleotide
acttcatagaggtgtgatt

SEQ ID NO: 7253 - DNA, 19 bp, Artificial Sequence
  Description of Artificial Sequence: Synthetic oligonucleotide
cttcatagaggtgtgattg

SEQ ID NO: 7254 - DNA, 19 bp, Artificial Sequence
  Description of Artificial Sequence: Synthetic oligonucleotide
ttcatagaggtgtgattgc

SEQ ID NO: 7255 - DNA, 19 bp, Artificial Sequence
  Description of Artificial Sequence: Synthetic oligonucleotide
tcatagaggtgtgattgca

SEQ ID NO: 7256 - DNA, 19 bp, Artificial Sequence
  Description of Artificial Sequence: Synthetic oligonucleotide
catagaggtgtgattgcac

SEQ ID NO: 7257 - DNA, 19 bp, Artificial Sequence
  Description of Artificial Sequence: Synthetic oligonucleotide
atagaggtgtgattgcact

SEQ ID NO: 7258 - DNA, 19 bp, Artificial Sequence
  Description of Artificial Sequence: Synthetic oligonucleotide
tagaggtgtgattgcactt

SEQ ID NO: 7259 - DNA, 19 bp, Artificial Sequence
  Description of Artificial Sequence: Synthetic oligonucleotide
agaggtgtgattgcacttt

SEQ ID NO: 7260 - DNA, 19 bp, Artificial Sequence
  Description of Artificial Sequence: Synthetic oligonucleotide
gaggtgtgattgcacttta

SEQ ID NO: 7261 - DNA, 19 bp, Artificial Sequence
  Description of Artificial Sequence: Synthetic oligonucleotide
aggtgtgattgcactttat

SEQ ID NO: 7262 - DNA, 19 bp, Artificial Sequence
  Description of Artificial Sequence: Synthetic oligonucleotide
ggtgtgattgcactttatg

SEQ ID NO: 7263 - DNA, 19 bp, Artificial Sequence
  Description of Artificial Sequence: Synthetic oligonucleotide
gtgtgattgcactttatgt

SEQ ID NO: 7264 - DNA, 19 bp, Artificial Sequence
  Description of Artificial Sequence: Synthetic oligonucleotide
tgtgattgcactttatgtc

SEQ ID NO: 7265 - DNA, 19 bp, Artificial Sequence
  Description of Artificial Sequence: Synthetic oligonucleotide
gtgattgcactttatgtct

SEQ ID NO: 7266 - DNA, 19 bp, Artificial Sequence
  Description of Artificial Sequence: Synthetic oligonucleotide
tgattgcactttatgtctg

SEQ ID NO: 7267 - DNA, 19 bp, Artificial Sequence
  Description of Artificial Sequence: Synthetic oligonucleotide
gattgcactttatgtctgc

SEQ ID NO: 7268 - DNA, 19 bp, Artificial Sequence
  Description of Artificial Sequence: Synthetic oligonucleotide
attgcactttatgtctgca

SEQ ID NO: 7269 - DNA, 19 bp, Artificial Sequence
  Description of Artificial Sequence: Synthetic oligonucleotide
ttgcactttatgtctgcag

SEQ ID NO: 7270 - DNA, 19 bp, Artificial Sequence
  Description of Artificial Sequence: Synthetic oligonucleotide
tgcactttatgtctgcaga

SEQ ID NO: 7271 - DNA, 19 bp, Artificial Sequence
  Description of Artificial Sequence: Synthetic oligonucleotide
gcactttatgtctgcagag

SEQ ID NO: 7272 - DNA, 19 bp, Artificial Sequence
  Description of Artificial Sequence: Synthetic oligonucleotide
cactttatgtctgcagaga

SEQ ID NO: 7273 - DNA, 19 bp, Artificial Sequence
  Description of Artificial Sequence: Synthetic oligonucleotide
actttatgtctgcagagag

SEQ ID NO: 7274 - DNA, 19 bp, Artificial Sequence
  Description of Artificial Sequence: Synthetic oligonucleotide
ctttatgtctgcagagagc

SEQ ID NO: 7275 - DNA, 19 bp, Artificial Sequence
  Description of Artificial Sequence: Synthetic oligonucleotide
tttatgtctgcagagagct

SEQ ID NO: 7276 - DNA, 19 bp, Artificial Sequence
  Description of Artificial Sequence: Synthetic oligonucleotide
ttatgtctgcagagagctg

SEQ ID NO: 7277 - DNA, 19 bp, Artificial Sequence
  Description of Artificial Sequence: Synthetic oligonucleotide
tatgtctgcagagagctgg

SEQ ID NO: 7278 - DNA, 19 bp, Artificial Sequence
  Description of Artificial Sequence: Synthetic oligonucleotide
atgtctgcagagagctggg

SEQ ID NO: 7279 - DNA, 19 bp, Artificial Sequence
  Description of Artificial Sequence: Synthetic oligonucleotide
tgtctgcagagagctgggg

SEQ ID NO: 7280 - DNA, 19 bp, Artificial Sequence
  Description of Artificial Sequence: Synthetic oligonucleotide
gtctgcagagagctggggc

SEQ ID NO: 7281 - DNA, 19 bp, Artificial Sequence
  Description of Artificial Sequence: Synthetic oligonucleotide
tctgcagagagctggggcg

SEQ ID NO: 7282 - DNA, 19 bp, Artificial Sequence
  Description of Artificial Sequence: Synthetic oligonucleotide
ctgcagagagctggggcga

SEQ ID NO: 7283 - DNA, 19 bp, Artificial Sequence
  Description of Artificial Sequence: Synthetic oligonucleotide
tgcagagagctggggcgag

SEQ ID NO: 7284 - DNA, 19 bp, Artificial Sequence
  Description of Artificial Sequence: Synthetic oligonucleotide
gcagagagctggggcgagt

SEQ ID NO: 7285 - DNA, 19 bp, Artificial Sequence
  Description of Artificial Sequence: Synthetic oligonucleotide
cagagagctggggcgagtg

SEQ ID NO: 7286 - DNA, 19 bp, Artificial Sequence
  Description of Artificial Sequence: Synthetic oligonucleotide
agagagctggggcgagtgt

SEQ ID NO: 7287 - DNA, 19 bp, Artificial Sequence
  Description of Artificial Sequence: Synthetic oligonucleotide
gagagctggggcgagtgtg

SEQ ID NO: 7288 - DNA, 19 bp, Artificial Sequence
  Description of Artificial Sequence: Synthetic oligonucleotide
agagctggggcgagtgtgt

SEQ ID NO: 7289 - DNA, 19 bp, Artificial Sequence
  Description of Artificial Sequence: Synthetic oligonucleotide
gagctggggcgagtgtgtt

SEQ ID NO: 7290 - DNA, 19 bp, Artificial Sequence
  Description of Artificial Sequence: Synthetic oligonucleotide
agctggggcgagtgtgttt

SEQ ID NO: 7291 - DNA, 19 bp, Artificial Sequence
  Description of Artificial Sequence: Synthetic oligonucleotide
gctggggcgagtgtgttta

SEQ ID NO: 7292 - DNA, 19 bp, Artificial Sequence
  Description of Artificial Sequence: Synthetic oligonucleotide
ctggggcgagtgtgtttag

SEQ ID NO: 7293 - DNA, 19 bp, Artificial Sequence
  Description of Artificial Sequence: Synthetic oligonucleotide
tggggcgagtgtgtttagg

SEQ ID NO: 7294 - DNA, 19 bp, Artificial Sequence
  Description of Artificial Sequence: Synthetic oligonucleotide
ggggcgagtgtgtttaggg

SEQ ID NO: 7295 - DNA, 19 bp, Artificial Sequence
  Description of Artificial Sequence: Synthetic oligonucleotide
gggcgagtgtgtttagggg

SEQ ID NO: 7296 - DNA, 19 bp, Artificial Sequence
  Description of Artificial Sequence: Synthetic oligonucleotide
ggcgagtgtgtttaggggt

SEQ ID NO: 7297 - DNA, 19 bp, Artificial Sequence
  Description of Artificial Sequence: Synthetic oligonucleotide
gcgagtgtgtttaggggtg

SEQ ID NO: 7298 - DNA, 19 bp, Artificial Sequence
  Description of Artificial Sequence: Synthetic oligonucleotide
cgagtgtgtttaggggtgg

SEQ ID NO: 7299 - DNA, 19 bp, Artificial Sequence
  Description of Artificial Sequence: Synthetic oligonucleotide
gagtgtgtttaggggtggc

SEQ ID NO: 7300 - DNA, 19 bp, Artificial Sequence
  Description of Artificial Sequence: Synthetic oligonucleotide
agtgtgtttaggggtggca

SEQ ID NO: 7301 - DNA, 19 bp, Artificial Sequence
  Description of Artificial Sequence: Synthetic oligonucleotide
gtgtgtttaggggtggcag

SEQ ID NO: 7302 - DNA, 19 bp, Artificial Sequence
  Description of Artificial Sequence: Synthetic oligonucleotide
tgtgtttaggggtggcagc

SEQ ID NO: 7303 - DNA, 19 bp, Artificial Sequence
  Description of Artificial Sequence: Synthetic oligonucleotide
gtgtttaggggtggcagct

SEQ ID NO: 7304 - DNA, 19 bp, Artificial Sequence
  Description of Artificial Sequence: Synthetic oligonucleotide
tgtttaggggtggcagctg

SEQ ID NO: 7305 - DNA, 19 bp, Artificial Sequence
  Description of Artificial Sequence: Synthetic oligonucleotide
gtttaggggtggcagctgc

SEQ ID NO: 7306 - DNA, 19 bp, Artificial Sequence
  Description of Artificial Sequence: Synthetic oligonucleotide
tttaggggtggcagctgcc

SEQ ID NO: 7307 - DNA, 19 bp, Artificial Sequence
  Description of Artificial Sequence: Synthetic oligonucleotide
ttaggggtggcagctgcct

SEQ ID NO: 7308 - DNA, 19 bp, Artificial Sequence
  Description of Artificial Sequence: Synthetic oligonucleotide
taggggtggcagctgcctt

SEQ ID NO: 7309 - DNA, 19 bp, Artificial Sequence
  Description of Artificial Sequence: Synthetic oligonucleotide
aggggtggcagctgccttc

SEQ ID NO: 7310 - DNA, 19 bp, Artificial Sequence
  Description of Artificial Sequence: Synthetic oligonucleotide
ggggtggcagctgccttct

SEQ ID NO: 7311 - DNA, 19 bp, Artificial Sequence
  Description of Artificial Sequence: Synthetic oligonucleotide
gggtggcagctgccttctt

SEQ ID NO: 7312 - DNA, 19 bp, Artificial Sequence
  Description of Artificial Sequence: Synthetic oligonucleotide
ggtggcagctgccttcttc

SEQ ID NO: 7313 - DNA, 19 bp, Artificial Sequence
  Description of Artificial Sequence: Synthetic oligonucleotide
gtggcagctgccttcttct

SEQ ID NO: 7314 - DNA, 19 bp, Artificial Sequence
  Description of Artificial Sequence: Synthetic oligonucleotide
tggcagctgccttcttctc

SEQ ID NO: 7315 - DNA, 19 bp, Artificial Sequence
  Description of Artificial Sequence: Synthetic oligonucleotide
ggcagctgccttcttctct

SEQ ID NO: 7316 - DNA, 19 bp, Artificial Sequence
  Description of Artificial Sequence: Synthetic oligonucleotide
gcagctgccttcttctctc

SEQ ID NO: 7317 - DNA, 19 bp, Artificial Sequence
  Description of Artificial Sequence: Synthetic oligonucleotide
cagctgccttcttctctct

SEQ ID NO: 7318 - DNA, 19 bp, Artificial Sequence
  Description of Artificial Sequence: Synthetic oligonucleotide
agctgccttcttctctctg

SEQ ID NO: 7319 - DNA, 19 bp, Artificial Sequence
  Description of Artificial Sequence: Synthetic oligonucleotide
gctgccttcttctctctgt

SEQ ID NO: 7320 - DNA, 19 bp, Artificial Sequence
  Description of Artificial Sequence: Synthetic oligonucleotide
ctgccttcttctctctgtc

SEQ ID NO: 7321 - DNA, 19 bp, Artificial Sequence
  Description of Artificial Sequence: Synthetic oligonucleotide
tgccttcttctctctgtcc

SEQ ID NO: 7322 - DNA, 19 bp, Artificial Sequence
  Description of Artificial Sequence: Synthetic oligonucleotide
gccttcttctctctgtccc

SEQ ID NO: 7323 - DNA, 19 bp, Artificial Sequence
  Description of Artificial Sequence: Synthetic oligonucleotide
ccttcttctctctgtcccc

SEQ ID NO: 7324 - DNA, 19 bp, Artificial Sequence
  Description of Artificial Sequence: Synthetic oligonucleotide
cttcttctctctgtcccct

SEQ ID NO: 7325 - DNA, 19 bp, Artificial Sequence
  Description of Artificial Sequence: Synthetic oligonucleotide
ttcttctctctgtcccctg

SEQ ID NO: 7326 - DNA, 19 bp, Artificial Sequence
  Description of Artificial Sequence: Synthetic oligonucleotide
tcttctctctgtcccctga

SEQ ID NO: 7327 - DNA, 19 bp, Artificial Sequence
  Description of Artificial Sequence: Synthetic oligonucleotide
cttctctctgtcccctgac

SEQ ID NO: 7328 - DNA, 19 bp, Artificial Sequence
  Description of Artificial Sequence: Synthetic oligonucleotide
ttctctctgtcccctgact

SEQ ID NO: 7329 - DNA, 19 bp, Artificial Sequence
  Description of Artificial Sequence: Synthetic oligonucleotide
tctctctgtcccctgactc

SEQ ID NO: 7330 - DNA, 19 bp, Artificial Sequence
  Description of Artificial Sequence: Synthetic oligonucleotide
ctctctgtcccctgactcc

SEQ ID NO: 7331 - DNA, 19 bp, Artificial Sequence
  Description of Artificial Sequence: Synthetic oligonucleotide
tctctgtcccctgactcct

SEQ ID NO: 7332 - DNA, 19 bp, Artificial Sequence
  Description of Artificial Sequence: Synthetic oligonucleotide
ctctgtcccctgactcctg

SEQ ID NO: 7333 - DNA, 19 bp, Artificial Sequence
  Description of Artificial Sequence: Synthetic oligonucleotide
tctgtcccctgactcctga

SEQ ID NO: 7334 - DNA, 19 bp, Artificial Sequence
  Description of Artificial Sequence: Synthetic oligonucleotide
ctgtcccctgactcctgac

SEQ ID NO: 7335 - DNA, 19 bp, Artificial Sequence
  Description of Artificial Sequence: Synthetic oligonucleotide
tgtcccctgactcctgact

SEQ ID NO: 7336 - DNA, 19 bp, Artificial Sequence
  Description of Artificial Sequence: Synthetic oligonucleotide
gtcccctgactcctgactg

SEQ ID NO: 7337 - DNA, 19 bp, Artificial Sequence
  Description of Artificial Sequence: Synthetic oligonucleotide
tcccctgactcctgactgt

SEQ ID NO: 7338 - DNA, 19 bp, Artificial Sequence
  Description of Artificial Sequence: Synthetic oligonucleotide
cccctgactcctgactgtg

SEQ ID NO: 7339 - DNA, 19 bp, Artificial Sequence
  Description of Artificial Sequence: Synthetic oligonucleotide
ccctgactcctgactgtgt

SEQ ID NO: 7340 - DNA, 19 bp, Artificial Sequence
  Description of Artificial Sequence: Synthetic oligonucleotide
cctgactcctgactgtgtt

SEQ ID NO: 7341 - DNA, 19 bp, Artificial Sequence
  Description of Artificial Sequence: Synthetic oligonucleotide
ctgactcctgactgtgttt

SEQ ID NO: 7342 - DNA, 19 bp, Artificial Sequence
  Description of Artificial Sequence: Synthetic oligonucleotide
tgactcctgactgtgtttc

SEQ ID NO: 7343 - DNA, 19 bp, Artificial Sequence
  Description of Artificial Sequence: Synthetic oligonucleotide
gactcctgactgtgtttct

SEQ ID NO: 7344 - DNA, 19 bp, Artificial Sequence
  Description of Artificial Sequence: Synthetic oligonucleotide
actcctgactgtgtttctg

SEQ ID NO: 7345 - DNA, 19 bp, Artificial Sequence
  Description of Artificial Sequence: Synthetic oligonucleotide
ctcctgactgtgtttctga

SEQ ID NO: 7346 - DNA, 19 bp, Artificial Sequence
  Description of Artificial Sequence: Synthetic oligonucleotide
tcctgactgtgtttctgag

SEQ ID NO: 7347 - DNA, 19 bp, Artificial Sequence
  Description of Artificial Sequence: Synthetic oligonucleotide
cctgactgtgtttctgagc

SEQ ID NO: 7348 - DNA, 19 bp, Artificial Sequence
  Description of Artificial Sequence: Synthetic oligonucleotide
ctgactgtgtttctgagct

SEQ ID NO: 7349 - DNA, 19 bp, Artificial Sequence
  Description of Artificial Sequence: Synthetic oligonucleotide
tgactgtgtttctgagctg

SEQ ID NO: 7350 - DNA, 19 bp, Artificial Sequence
  Description of Artificial Sequence: Synthetic oligonucleotide
gactgtgtttctgagctga

SEQ ID NO: 7351 - DNA, 19 bp, Artificial Sequence
  Description of Artificial Sequence: Synthetic oligonucleotide
actgtgtttctgagctgag

SEQ ID NO: 7352 - DNA, 19 bp, Artificial Sequence
  Description of Artificial Sequence: Synthetic oligonucleotide
ctgtgtttctgagctgagc

SEQ ID NO: 7353 - DNA, 19 bp, Artificial Sequence
  Description of Artificial Sequence: Synthetic oligonucleotide
tgtgtttctgagctgagct

SEQ ID NO: 7354 - DNA, 19 bp, Artificial Sequence
  Description of Artificial Sequence: Synthetic oligonucleotide
gtgtttctgagctgagctt

SEQ ID NO: 7355 - DNA, 19 bp, Artificial Sequence
  Description of Artificial Sequence: Synthetic oligonucleotide
tgtttctgagctgagctta

SEQ ID NO: 7356 - DNA, 19 bp, Artificial Sequence
  Description of Artificial Sequence: Synthetic oligonucleotide
gtttctgagctgagcttaa

SEQ ID NO: 7357 - DNA, 19 bp, Artificial Sequence
  Description of Artificial Sequence: Synthetic oligonucleotide
tttctgagctgagcttaaa

SEQ ID NO: 7358 - DNA, 19 bp, Artificial Sequence
  Description of Artificial Sequence: Synthetic oligonucleotide
ttctgagctgagcttaaaa

SEQ ID NO: 7359 - DNA, 19 bp, Artificial Sequence
  Description of Artificial Sequence: Synthetic oligonucleotide
tctgagctgagcttaaaag

SEQ ID NO: 7360 - DNA, 19 bp, Artificial Sequence
  Description of Artificial Sequence: Synthetic oligonucleotide
ctgagctgagcttaaaaga

SEQ ID NO: 7361 - DNA, 19 bp, Artificial Sequence
  Description of Artificial Sequence: Synthetic oligonucleotide
tgagctgagcttaaaagat

SEQ ID NO: 7362 - DNA, 19 bp, Artificial Sequence
  Description of Artificial Sequence: Synthetic oligonucleotide
gagctgagcttaaaagata

SEQ ID NO: 7363 - DNA, 19 bp, Artificial Sequence
  Description of Artificial Sequence: Synthetic oligonucleotide
agctgagcttaaaagatac

SEQ ID NO: 7364 - DNA, 19 bp, Artificial Sequence
  Description of Artificial Sequence: Synthetic oligonucleotide
gctgagcttaaaagataca

SEQ ID NO: 7365 - DNA, 19 bp, Artificial Sequence
  Description of Artificial Sequence: Synthetic oligonucleotide
ctgagcttaaaagatacaa

SEQ ID NO: 7366 - DNA, 19 bp, Artificial Sequence
  Description of Artificial Sequence: Synthetic oligonucleotide
tgagcttaaaagatacaaa

SEQ ID NO: 7367 - DNA, 19 bp, Artificial Sequence
  Description of Artificial Sequence: Synthetic oligonucleotide
gagcttaaaagatacaaat

SEQ ID NO: 7368 - DNA, 19 bp, Artificial Sequence
  Description of Artificial Sequence: Synthetic oligonucleotide
agcttaaaagatacaaatg

SEQ ID NO: 7369 - DNA, 19 bp, Artificial Sequence
  Description of Artificial Sequence: Synthetic oligonucleotide
gcttaaaagatacaaatga

SEQ ID NO: 7370 - DNA, 19 bp, Artificial Sequence
  Description of Artificial Sequence: Synthetic oligonucleotide
cttaaaagatacaaatgac

SEQ ID NO: 7371 - DNA, 19 bp, Artificial Sequence
  Description of Artificial Sequence: Synthetic oligonucleotide
ttaaaagatacaaatgaca

SEQ ID NO: 7372 - DNA, 19 bp, Artificial Sequence
  Description of Artificial Sequence: Synthetic oligonucleotide
taaaagatacaaatgacaa

SEQ ID NO: 7373 - DNA, 19 bp, Artificial Sequence
  Description of Artificial Sequence: Synthetic oligonucleotide
aaaagatacaaatgacaag

SEQ ID NO: 7374 - DNA, 19 bp, Artificial Sequence
  Description of Artificial Sequence: Synthetic oligonucleotide
aaagatacaaatgacaagc

SEQ ID NO: 7375 - DNA, 19 bp, Artificial Sequence
  Description of Artificial Sequence: Synthetic oligonucleotide
aagatacaaatgacaagct

SEQ ID NO: 7376 - DNA, 19 bp, Artificial Sequence
  Description of Artificial Sequence: Synthetic oligonucleotide
agatacaaatgacaagctg

SEQ ID NO: 7377 - DNA, 19 bp, Artificial Sequence
  Description of Artificial Sequence: Synthetic oligonucleotide
gatacaaatgacaagctgc

SEQ ID NO: 7378 - DNA, 19 bp, Artificial Sequence
  Description of Artificial Sequence: Synthetic oligonucleotide
atacaaatgacaagctgca

SEQ ID NO: 7379 - DNA, 19 bp, Artificial Sequence
  Description of Artificial Sequence: Synthetic oligonucleotide
tacaaatgacaagctgcag

SEQ ID NO: 7380 - DNA, 19 bp, Artificial Sequence
  Description of Artificial Sequence: Synthetic oligonucleotide
acaaatgacaagctgcagc

SEQ ID NO: 7381 - DNA, 19 bp, Artificial Sequence
  Description of Artificial Sequence: Synthetic oligonucleotide
caaatgacaagctgcagct

SEQ ID NO: 7382 - DNA, 19 bp, Artificial Sequence
  Description of Artificial Sequence: Synthetic oligonucleotide
aaatgacaagctgcagctc

SEQ ID NO: 7383 - DNA, 19 bp, Artificial Sequence
  Description of Artificial Sequence: Synthetic oligonucleotide
aatgacaagctgcagctct

SEQ ID NO: 7384 - DNA, 19 bp, Artificial Sequence
  Description of Artificial Sequence: Synthetic oligonucleotide
atgacaagctgcagctctc

SEQ ID NO: 7385 - DNA, 19 bp, Artificial Sequence
  Description of Artificial Sequence: Synthetic oligonucleotide
tgacaagctgcagctctct

SEQ ID NO: 7386 - DNA, 19 bp, Artificial Sequence
  Description of Artificial Sequence: Synthetic oligonucleotide
gacaagctgcagctctctc

SEQ ID NO: 7387 - DNA, 19 bp, Artificial Sequence
  Description of Artificial Sequence: Synthetic oligonucleotide
acaagctgcagctctctct

SEQ ID NO: 7388 - DNA, 19 bp, Artificial Sequence
  Description of Artificial Sequence: Synthetic oligonucleotide
caagctgcagctctctctg

SEQ ID NO: 7389 - DNA, 19 bp, Artificial Sequence
  Description of Artificial Sequence: Synthetic oligonucleotide
aagctgcagctctctctgc

SEQ ID NO: 7390 - DNA, 19 bp, Artificial Sequence
  Description of Artificial Sequence: Synthetic oligonucleotide
agctgcagctctctctgcc

SEQ ID NO: 7391 - DNA, 19 bp, Artificial Sequence
  Description of Artificial Sequence: Synthetic oligonucleotide
gctgcagctctctctgcca

SEQ ID NO: 7392 - DNA, 19 bp, Artificial Sequence
  Description of Artificial Sequence: Synthetic oligonucleotide
ctgcagctctctctgccat

SEQ ID NO: 7393 - DNA, 19 bp, Artificial Sequence
  Description of Artificial Sequence: Synthetic oligonucleotide
tgcagctctctctgccatt

SEQ ID NO: 7394 - DNA, 19 bp, Artificial Sequence
  Description of Artificial Sequence: Synthetic oligonucleotide
gcagctctctctgccattg

SEQ ID NO: 7395 - DNA, 19 bp, Artificial Sequence
  Description of Artificial Sequence: Synthetic oligonucleotide
cagctctctctgccattgc

SEQ ID NO: 7396 - DNA, 19 bp, Artificial Sequence
  Description of Artificial Sequence: Synthetic oligonucleotide
agctctctctgccattgct

SEQ ID NO: 7397 - DNA, 19 bp, Artificial Sequence
  Description of Artificial Sequence: Synthetic oligonucleotide
gctctctctgccattgctt

SEQ ID NO: 7398 - DNA, 19 bp, Artificial Sequence
  Description of Artificial Sequence: Synthetic oligonucleotide
ctctctctgccattgcttc

SEQ ID NO: 7399 - DNA, 19 bp, Artificial Sequence
  Description of Artificial Sequence: Synthetic oligonucleotide
tctctctgccattgcttct

SEQ ID NO: 7400 - DNA, 19 bp, Artificial Sequence
  Description of Artificial Sequence: Synthetic oligonucleotide
ctctctgccattgcttctc

SEQ ID NO: 7401 - DNA, 19 bp, Artificial Sequence
  Description of Artificial Sequence: Synthetic oligonucleotide
tctctgccattgcttctct

SEQ ID NO: 7402 - DNA, 19 bp, Artificial Sequence
  Description of Artificial Sequence: Synthetic oligonucleotide
ctctgccattgcttctctt

SEQ ID NO: 7403 - DNA, 19 bp, Artificial Sequence
  Description of Artificial Sequence: Synthetic oligonucleotide
tctgccattgcttctcttt

SEQ ID NO: 7404 - DNA, 19 bp, Artificial Sequence
  Description of Artificial Sequence: Synthetic oligonucleotide
ctgccattgcttctcttta

SEQ ID NO: 7405 - DNA, 19 bp, Artificial Sequence
  Description of Artificial Sequence: Synthetic oligonucleotide
tgccattgcttctctttat

SEQ ID NO: 7406 - DNA, 19 bp, Artificial Sequence
  Description of Artificial Sequence: Synthetic oligonucleotide
gccattgcttctctttatc

SEQ ID NO: 7407 - DNA, 19 bp, Artificial Sequence
  Description of Artificial Sequence: Synthetic oligonucleotide
ccattgcttctctttatct

SEQ ID NO: 7408 - DNA, 19 bp, Artificial Sequence
  Description of Artificial Sequence: Synthetic oligonucleotide
cattgcttctctttatctc

SEQ ID NO: 7409 - DNA, 19 bp, Artificial Sequence
  Description of Artificial Sequence: Synthetic oligonucleotide
attgcttctctttatctct

SEQ ID NO: 7410 - DNA, 19 bp, Artificial Sequence
  Description of Artificial Sequence: Synthetic oligonucleotide
ttgcttctctttatctctc

SEQ ID NO: 7411 - DNA, 19 bp, Artificial Sequence
  Description of Artificial Sequence: Synthetic oligonucleotide
tgcttctctttatctctcc

SEQ ID NO: 7412 - DNA, 19 bp, Artificial Sequence
  Description of Artificial Sequence: Synthetic oligonucleotide
gcttctctttatctctcca

SEQ ID NO: 7413 - DNA, 19 bp, Artificial Sequence
  Description of Artificial Sequence: Synthetic oligonucleotide
cttctctttatctctccaa

SEQ ID NO: 7414 - DNA, 19 bp, Artificial Sequence
  Description of Artificial Sequence: Synthetic oligonucleotide
ttctctttatctctccaaa

SEQ ID NO: 7415 - DNA, 19 bp, Artificial Sequence
  Description of Artificial Sequence: Synthetic oligonucleotide
tctctttatctctccaaat

SEQ ID NO: 7416 - DNA, 19 bp, Artificial Sequence
  Description of Artificial Sequence: Synthetic oligonucleotide
ctctttatctctccaaatc

SEQ ID NO: 7417 - DNA, 19 bp, Artificial Sequence
  Description of Artificial Sequence: Synthetic oligonucleotide
tctttatctctccaaatcc

SEQ ID NO: 7418 - DNA, 19 bp, Artificial Sequence
  Description of Artificial Sequence: Synthetic oligonucleotide
ctttatctctccaaatccc

SEQ ID NO: 7419 - DNA, 19 bp, Artificial Sequence
  Description of Artificial Sequence: Synthetic oligonucleotide
tttatctctccaaatccct

SEQ ID NO: 7420 - DNA, 19 bp, Artificial Sequence
  Description of Artificial Sequence: Synthetic oligonucleotide
ttatctctccaaatccctt

SEQ ID NO: 7421 - DNA, 19 bp, Artificial Sequence
  Description of Artificial Sequence: Synthetic oligonucleotide
tatctctccaaatcccttc

SEQ ID NO: 7422 - DNA, 19 bp, Artificial Sequence
  Description of Artificial Sequence: Synthetic oligonucleotide
atctctccaaatcccttcc

SEQ ID NO: 7423 - DNA, 19 bp, Artificial Sequence
  Description of Artificial Sequence: Synthetic oligonucleotide
tctctccaaatcccttcca

SEQ ID NO: 7424 - DNA, 19 bp, Artificial Sequence
  Description of Artificial Sequence: Synthetic oligonucleotide
ctctccaaatcccttccac

SEQ ID NO: 7425 - DNA, 19 bp, Artificial Sequence
  Description of Artificial Sequence: Synthetic oligonucleotide
tctccaaatcccttccaca

SEQ ID NO: 7426 - DNA, 19 bp, Artificial Sequence
  Description of Artificial Sequence: Synthetic oligonucleotide
ctccaaatcccttccacac

SEQ ID NO: 7427 - DNA, 19 bp, Artificial Sequence
  Description of Artificial Sequence: Synthetic oligonucleotide
tccaaatcccttccacact

SEQ ID NO: 7428 - DNA, 19 bp, Artificial Sequence
  Description of Artificial Sequence: Synthetic oligonucleotide
ccaaatcccttccacactc

SEQ ID NO: 7429 - DNA, 19 bp, Artificial Sequence
  Description of Artificial Sequence: Synthetic oligonucleotide
caaatcccttccacactcg

SEQ ID NO: 7430 - DNA, 19 bp, Artificial Sequence
  Description of Artificial Sequence: Synthetic oligonucleotide
aaatcccttccacactcga

SEQ ID NO: 7431 - DNA, 19 bp, Artificial Sequence
  Description of Artificial Sequence: Synthetic oligonucleotide
aatcccttccacactcgag

SEQ ID NO: 7432 - DNA, 19 bp, Artificial Sequence
  Description of Artificial Sequence: Synthetic oligonucleotide
atcccttccacactcgagg

SEQ ID NO: 7433 - DNA, 19 bp, Artificial Sequence
  Description of Artificial Sequence: Synthetic oligonucleotide
tcccttccacactcgaggt

SEQ ID NO: 7434 - DNA, 19 bp, Artificial Sequence
  Description of Artificial Sequence: Synthetic oligonucleotide
cccttccacactcgaggtt

SEQ ID NO: 7435 - DNA, 19 bp, Artificial Sequence
  Description of Artificial Sequence: Synthetic oligonucleotide
ccttccacactcgaggttt

SEQ ID NO: 7436 - DNA, 19 bp, Artificial Sequence
  Description of Artificial Sequence: Synthetic oligonucleotide
cttccacactcgaggtttt

SEQ ID NO: 7437 - DNA, 19 bp, Artificial Sequence
  Description of Artificial Sequence: Synthetic oligonucleotide
ttccacactcgaggttttc

SEQ ID NO: 7438 - DNA, 19 bp, Artificial Sequence
  Description of Artificial Sequence: Synthetic oligonucleotide
tccacactcgaggttttcg

SEQ ID NO: 7439 - DNA, 19 bp, Artificial Sequence
  Description of Artificial Sequence: Synthetic oligonucleotide
ccacactcgaggttttcga

SEQ ID NO: 7440 - DNA, 19 bp, Artificial Sequence
  Description of Artificial Sequence: Synthetic oligonucleotide
cacactcgaggttttcgac

SEQ ID NO: 7441 - DNA, 19 bp, Artificial Sequence
  Description of Artificial Sequence: Synthetic oligonucleotide
acactcgaggttttcgaca

SEQ ID NO: 7442 - DNA, 19 bp, Artificial Sequence
  Description of Artificial Sequence: Synthetic oligonucleotide
cactcgaggttttcgacac

SEQ ID NO: 7443 - DNA, 19 bp, Artificial Sequence
  Description of Artificial Sequence: Synthetic oligonucleotide
actcgaggttttcgacact

SEQ ID NO: 7444 - DNA, 19 bp, Artificial Sequence
  Description of Artificial Sequence: Synthetic oligonucleotide
ctcgaggttttcgacactg

SEQ ID NO: 7445 - DNA, 19 bp, Artificial Sequence
  Description of Artificial Sequence: Synthetic oligonucleotide
tcgaggttttcgacactgg

SEQ ID NO: 7446 - DNA, 19 bp, Artificial Sequence
  Description of Artificial Sequence: Synthetic oligonucleotide
cgaggttttcgacactgga

SEQ ID NO: 7447 - DNA, 19 bp, Artificial Sequence
  Description of Artificial Sequence: Synthetic oligonucleotide
gaggttttcgacactggaa

SEQ ID NO: 7448 - DNA, 19 bp, Artificial Sequence
  Description of Artificial Sequence: Synthetic oligonucleotide
aggttttcgacactggaac

SEQ ID NO: 7449 - DNA, 19 bp, Artificial Sequence
  Description of Artificial Sequence: Synthetic oligonucleotide
ggttttcgacactggaacc

SEQ ID NO: 7450 - DNA, 19 bp, Artificial Sequence
  Description of Artificial Sequence: Synthetic oligonucleotide
gttttcgacactggaaccc

SEQ ID NO: 7451 - DNA, 19 bp, Artificial Sequence
  Description of Artificial Sequence: Synthetic oligonucleotide
ttttcgacactggaaccca

SEQ ID NO: 7452 - DNA, 19 bp, Artificial Sequence
  Description of Artificial Sequence: Synthetic oligonucleotide
tttcgacactggaacccag

SEQ ID NO: 7453 - DNA, 19 bp, Artificial Sequence
  Description of Artificial Sequence: Synthetic oligonucleotide
ttcgacactggaacccagt

SEQ ID NO: 7454 - DNA, 19 bp, Artificial Sequence
  Description of Artificial Sequence: Synthetic oligonucleotide
tcgacactggaacccagtg

SEQ ID NO: 7455 - DNA, 19 bp, Artificial Sequence
  Description of Artificial Sequence: Synthetic oligonucleotide
cgacactggaacccagtgc

SEQ ID NO: 7456 - DNA, 19 bp, Artificial Sequence
  Description of Artificial Sequence: Synthetic oligonucleotide
gacactggaacccagtgca

SEQ ID NO: 7457 - DNA, 19 bp, Artificial Sequence
  Description of Artificial Sequence: Synthetic oligonucleotide
acactggaacccagtgcag

SEQ ID NO: 7458 - DNA, 19 bp, Artificial Sequence
  Description of Artificial Sequence: Synthetic oligonucleotide
cactggaacccagtgcagc

SEQ ID NO: 7459 - DNA, 19 bp, Artificial Sequence
  Description of Artificial Sequence: Synthetic oligonucleotide
actggaacccagtgcagcg

SEQ ID NO: 7460 - DNA, 19 bp, Artificial Sequence
  Description of Artificial Sequence: Synthetic oligonucleotide
ctggaacccagtgcagcgt

SEQ ID NO: 7461 - DNA, 19 bp, Artificial Sequence
  Description of Artificial Sequence: Synthetic oligonucleotide
tggaacccagtgcagcgtt

SEQ ID NO: 7462 - DNA, 19 bp, Artificial Sequence
  Description of Artificial Sequence: Synthetic oligonucleotide
ggaacccagtgcagcgttg

SEQ ID NO: 7463 - DNA, 19 bp, Artificial Sequence
  Description of Artificial Sequence: Synthetic oligonucleotide
gaacccagtgcagcgttgg

SEQ ID NO: 7464 - DNA, 19 bp, Artificial Sequence
  Description of Artificial Sequence: Synthetic oligonucleotide
aacccagtgcagcgttggc

SEQ ID NO: 7465 - DNA, 19 bp, Artificial Sequence
  Description of Artificial Sequence: Synthetic oligonucleotide
acccagtgcagcgttggct

SEQ ID NO: 7466 - DNA, 19 bp, Artificial Sequence
  Description of Artificial Sequence: Synthetic oligonucleotide
cccagtgcagcgttggctt

SEQ ID NO: 7467 - DNA, 19 bp, Artificial Sequence
  Description of Artificial Sequence: Synthetic oligonucleotide
ccagtgcagcgttggcttg

SEQ ID NO: 7468 - DNA, 19 bp, Artificial Sequence
  Description of Artificial Sequence: Synthetic oligonucleotide
cagtgcagcgttggcttgg

SEQ ID NO: 7469 - DNA, 19 bp, Artificial Sequence
  Description of Artificial Sequence: Synthetic oligonucleotide
agtgcagcgttggcttggg

SEQ ID NO: 7470 - DNA, 19 bp, Artificial Sequence
  Description of Artificial Sequence: Synthetic oligonucleotide
gtgcagcgttggcttggga

SEQ ID NO: 7471 - DNA, 19 bp, Artificial Sequence
  Description of Artificial Sequence: Synthetic oligonucleotide
tgcagcgttggcttgggac

SEQ ID NO: 7472 - DNA, 19 bp, Artificial Sequence
  Description of Artificial Sequence: Synthetic oligonucleotide
gcagcgttggcttgggacc

SEQ ID NO: 7473 - DNA, 19 bp, Artificial Sequence
  Description of Artificial Sequence: Synthetic oligonucleotide
cagcgttggcttgggaccg

SEQ ID NO: 7474 - DNA, 19 bp, Artificial Sequence
  Description of Artificial Sequence: Synthetic oligonucleotide
agcgttggcttgggaccgc

SEQ ID NO: 7475 - DNA, 19 bp, Artificial Sequence
  Description of Artificial Sequence: Synthetic oligonucleotide
gcgttggcttgggaccgcc

SEQ ID NO: 7476 - DNA, 19 bp, Artificial Sequence
  Description of Artificial Sequence: Synthetic oligonucleotide
cgttggcttgggaccgcca

SEQ ID NO: 7477 - DNA, 19 bp, Artificial Sequence
  Description of Artificial Sequence: Synthetic oligonucleotide
gttggcttgggaccgccat

SEQ ID NO: 7478 - DNA, 19 bp, Artificial Sequence
  Description of Artificial Sequence: Synthetic oligonucleotide
ttggcttgggaccgccatg

SEQ ID NO: 7479 - DNA, 19 bp, Artificial Sequence
  Description of Artificial Sequence: Synthetic oligonucleotide
tggcttgggaccgccatga

SEQ ID NO: 7480 - DNA, 19 bp, Artificial Sequence
  Description of Artificial Sequence: Synthetic oligonucleotide
ggcttgggaccgccatgaa

SEQ ID NO: 7481 - DNA, 19 bp, Artificial Sequence
  Description of Artificial Sequence: Synthetic oligonucleotide
gcttgggaccgccatgaag

SEQ ID NO: 7482 - DNA, 19 bp, Artificial Sequence
  Description of Artificial Sequence: Synthetic oligonucleotide
cttgggaccgccatgaaga

SEQ ID NO: 7483 - DNA, 19 bp, Artificial Sequence
  Description of Artificial Sequence: Synthetic oligonucleotide
ttgggaccgccatgaagac

SEQ ID NO: 7484 - DNA, 19 bp, Artificial Sequence
  Description of Artificial Sequence: Synthetic oligonucleotide
tgggaccgccatgaagacc

SEQ ID NO: 7485 - DNA, 19 bp, Artificial Sequence
  Description of Artificial Sequence: Synthetic oligonucleotide
gggaccgccatgaagaccc

SEQ ID NO: 7486 - DNA, 19 bp, Artificial Sequence
  Description of Artificial Sequence: Synthetic oligonucleotide
ggaccgccatgaagacccc

SEQ ID NO: 7487 - DNA, 19 bp, Artificial Sequence
  Description of Artificial Sequence: Synthetic oligonucleotide
gaccgccatgaagacccca

SEQ ID NO: 7488 - DNA, 19 bp, Artificial Sequence
  Description of Artificial Sequence: Synthetic oligonucleotide
accgccatgaagaccccat

SEQ ID NO: 7489 - DNA, 19 bp, Artificial Sequence
  Description of Artificial Sequence: Synthetic oligonucleotide
ccgccatgaagaccccatg

SEQ ID NO: 7490 - DNA, 19 bp, Artificial Sequence
  Description of Artificial Sequence: Synthetic oligonucleotide
cgccatgaagaccccatgt

SEQ ID NO: 7491 - DNA, 19 bp, Artificial Sequence
  Description of Artificial Sequence: Synthetic oligonucleotide
gccatgaagaccccatgtt

SEQ ID NO: 7492 - DNA, 19 bp, Artificial Sequence
  Description of Artificial Sequence: Synthetic oligonucleotide
ccatgaagaccccatgttt

SEQ ID NO: 7493 - DNA, 19 bp, Artificial Sequence
  Description of Artificial Sequence: Synthetic oligonucleotide
catgaagaccccatgtttg

SEQ ID NO: 7494 - DNA, 19 bp, Artificial Sequence
  Description of Artificial Sequence: Synthetic oligonucleotide
atgaagaccccatgtttgc

SEQ ID NO: 7495 - DNA, 19 bp, Artificial Sequence
  Description of Artificial Sequence: Synthetic oligonucleotide
tgaagaccccatgtttgcg

SEQ ID NO: 7496 - DNA, 19 bp, Artificial Sequence
  Description of Artificial Sequence: Synthetic oligonucleotide
gaagaccccatgtttgcga

SEQ ID NO: 7497 - DNA, 19 bp, Artificial Sequence
  Description of Artificial Sequence: Synthetic oligonucleotide
aagaccccatgtttgcgac

SEQ ID NO: 7498 - DNA, 19 bp, Artificial Sequence
  Description of Artificial Sequence: Synthetic oligonucleotide
agaccccatgtttgcgaca

SEQ ID NO: 7499 - DNA, 19 bp, Artificial Sequence
  Description of Artificial Sequence: Synthetic oligonucleotide
gaccccatgtttgcgacag

SEQ ID NO: 7500 - DNA, 19 bp, Artificial Sequence
  Description of Artificial Sequence: Synthetic oligonucleotide
accccatgtttgcgacagg

SEQ ID NO: 7501 - DNA, 19 bp, Artificial Sequence
  Description of Artificial Sequence: Synthetic oligonucleotide
ccccatgtttgcgacagga

SEQ ID NO: 7502 - DNA, 19 bp, Artificial Sequence
  Description of Artificial Sequence: Synthetic oligonucleotide
cccatgtttgcgacaggag

SEQ ID NO: 7503 - DNA, 19 bp, Artificial Sequence
  Description of Artificial Sequence: Synthetic oligonucleotide
ccatgtttgcgacaggaga

SEQ ID NO: 7504 - DNA, 19 bp, Artificial Sequence
  Description of Artificial Sequence: Synthetic oligonucleotide
catgtttgcgacaggagag

SEQ ID NO: 7505 - DNA, 19 bp, Artificial Sequence
  Description of Artificial Sequence: Synthetic oligonucleotide
atgtttgcgacaggagagc

SEQ ID NO: 7506 - DNA, 19 bp, Artificial Sequence
  Description of Artificial Sequence: Synthetic oligonucleotide
tgtttgcgacaggagagcc

SEQ ID NO: 7507 - DNA, 19 bp, Artificial Sequence
  Description of Artificial Sequence: Synthetic oligonucleotide
gtttgcgacaggagagcct

SEQ ID NO: 7508 - DNA, 19 bp, Artificial Sequence
  Description of Artificial Sequence: Synthetic oligonucleotide
tttgcgacaggagagcctg

SEQ ID NO: 7509 - DNA, 19 bp, Artificial Sequence
  Description of Artificial Sequence: Synthetic oligonucleotide
ttgcgacaggagagcctgg

SEQ ID NO: 7510 - DNA, 19 bp, Artificial Sequence
  Description of Artificial Sequence: Synthetic oligonucleotide
tgcgacaggagagcctggg

SEQ ID NO: 7511 - DNA, 19 bp, Artificial Sequence
  Description of Artificial Sequence: Synthetic oligonucleotide
gcgacaggagagcctgggt

SEQ ID NO: 7512 - DNA, 19 bp, Artificial Sequence
  Description of Artificial Sequence: Synthetic oligonucleotide
cgacaggagagcctgggtt

SEQ ID NO: 7513 - DNA, 19 bp, Artificial Sequence
  Description of Artificial Sequence: Synthetic oligonucleotide
gacaggagagcctgggttg

SEQ ID NO: 7514 - DNA, 19 bp, Artificial Sequence
  Description of Artificial Sequence: Synthetic oligonucleotide
acaggagagcctgggttgg

SEQ ID NO: 7515 - DNA, 19 bp, Artificial Sequence
  Description of Artificial Sequence: Synthetic oligonucleotide
caggagagcctgggttggt

SEQ ID NO: 7516 - DNA, 19 bp, Artificial Sequence
  Description of Artificial Sequence: Synthetic oligonucleotide
aggagagcctgggttggtg

SEQ ID NO: 7517 - DNA, 19 bp, Artificial Sequence
  Description of Artificial Sequence: Synthetic oligonucleotide
ggagagcctgggttggtgt

SEQ ID NO: 7518 - DNA, 19 bp, Artificial Sequence
  Description of Artificial Sequence: Synthetic oligonucleotide
gagagcctgggttggtgtt

SEQ ID NO: 7519 - DNA, 19 bp, Artificial Sequence
  Description of Artificial Sequence: Synthetic oligonucleotide
agagcctgggttggtgttg

SEQ ID NO: 7520 - DNA, 19 bp, Artificial Sequence
  Description of Artificial Sequence: Synthetic oligonucleotide
gagcctgggttggtgttga

SEQ ID NO: 7521 - DNA, 19 bp, Artificial Sequence
  Description of Artificial Sequence: Synthetic oligonucleotide
agcctgggttggtgttgag

SEQ ID NO: 7522 - DNA, 19 bp, Artificial Sequence
  Description of Artificial Sequence: Synthetic oligonucleotide
gcctgggttggtgttgagt

SEQ ID NO: 7523 - DNA, 19 bp, Artificial Sequence
  Description of Artificial Sequence: Synthetic oligonucleotide
cctgggttggtgttgagta

SEQ ID NO: 7524 - DNA, 19 bp, Artificial Sequence
  Description of Artificial Sequence: Synthetic oligonucleotide
ctgggttggtgttgagtac

SEQ ID NO: 7525 - DNA, 19 bp, Artificial Sequence
  Description of Artificial Sequence: Synthetic oligonucleotide
tgggttggtgttgagtaca

SEQ ID NO: 7526 - DNA, 19 bp, Artificial Sequence
  Description of Artificial Sequence: Synthetic oligonucleotide
gggttggtgttgagtacat

SEQ ID NO: 7527 - DNA, 19 bp, Artificial Sequence
  Description of Artificial Sequence: Synthetic oligonucleotide
ggttggtgttgagtacata

SEQ ID NO: 7528 - DNA, 19 bp, Artificial Sequence
  Description of Artificial Sequence: Synthetic oligonucleotide
gttggtgttgagtacataa

SEQ ID NO: 7529 - DNA, 19 bp, Artificial Sequence
  Description of Artificial Sequence: Synthetic oligonucleotide
ttggtgttgagtacataag

SEQ ID NO: 7530 - DNA, 19 bp, Artificial Sequence
  Description of Artificial Sequence: Synthetic oligonucleotide
tggtgttgagtacataaga

SEQ ID NO: 7531 - DNA, 19 bp, Artificial Sequence
  Description of Artificial Sequence: Synthetic oligonucleotide
ggtgttgagtacataagag

SEQ ID NO: 7532 - DNA, 19 bp, Artificial Sequence
  Description of Artificial Sequence: Synthetic oligonucleotide
gtgttgagtacataagaga

SEQ ID NO: 7533 - DNA, 19 bp, Artificial Sequence
  Description of Artificial Sequence: Synthetic oligonucleotide
tgttgagtacataagagac

SEQ ID NO: 7534 - DNA, 19 bp, Artificial Sequence
  Description of Artificial Sequence: Synthetic oligonucleotide
gttgagtacataagagacg

SEQ ID NO: 7535 - DNA, 19 bp, Artificial Sequence
  Description of Artificial Sequence: Synthetic oligonucleotide
ttgagtacataagagacga

SEQ ID NO: 7536 - DNA, 19 bp, Artificial Sequence
  Description of Artificial Sequence: Synthetic oligonucleotide
tgagtacataagagacgag

SEQ ID NO: 7537 - DNA, 19 bp, Artificial Sequence
  Description of Artificial Sequence: Synthetic oligonucleotide
gagtacataagagacgagg

SEQ ID NO: 7538 - DNA, 19 bp, Artificial Sequence
  Description of Artificial Sequence: Synthetic oligonucleotide
agtacataagagacgaggc

SEQ ID NO: 7539 - DNA, 19 bp, Artificial Sequence
  Description of Artificial Sequence: Synthetic oligonucleotide
gtacataagagacgaggca

SEQ ID NO: 7540 - DNA, 19 bp, Artificial Sequence
  Description of Artificial Sequence: Synthetic oligonucleotide
tacataagagacgaggcaa

SEQ ID NO: 7541 - DNA, 19 bp, Artificial Sequence
  Description of Artificial Sequence: Synthetic oligonucleotide
acataagagacgaggcaag

SEQ ID NO: 7542 - DNA, 19 bp, Artificial Sequence
  Description of Artificial Sequence: Synthetic oligonucleotide
cataagagacgaggcaagg

SEQ ID NO: 7543 - DNA, 19 bp, Artificial Sequence
  Description of Artificial Sequence: Synthetic oligonucleotide
ataagagacgaggcaaggt

SEQ ID NO: 7544 - DNA, 19 bp, Artificial Sequence
  Description of Artificial Sequence: Synthetic oligonucleotide
taagagacgaggcaaggtt

SEQ ID NO: 7545 - DNA, 19 bp, Artificial Sequence
  Description of Artificial Sequence: Synthetic oligonucleotide
aagagacgaggcaaggttc

SEQ ID NO: 7546 - DNA, 19 bp, Artificial Sequence
  Description of Artificial Sequence: Synthetic oligonucleotide
agagacgaggcaaggttca

SEQ ID NO: 7547 - DNA, 19 bp, Artificial Sequence
  Description of Artificial Sequence: Synthetic oligonucleotide
gagacgaggcaaggttcag

SEQ ID NO: 7548 - DNA, 19 bp, Artificial Sequence
  Description of Artificial Sequence: Synthetic oligonucleotide
agacgaggcaaggttcagc

SEQ ID NO: 7549 - DNA, 19 bp, Artificial Sequence
  Description of Artificial Sequence: Synthetic oligonucleotide
gacgaggcaaggttcagct

SEQ ID NO: 7550 - DNA, 19 bp, Artificial Sequence
  Description of Artificial Sequence: Synthetic oligonucleotide
acgaggcaaggttcagcta

SEQ ID NO: 7551 - DNA, 19 bp, Artificial Sequence
  Description of Artificial Sequence: Synthetic oligonucleotide
cgaggcaaggttcagctaa

SEQ ID NO: 7552 - DNA, 19 bp, Artificial Sequence
  Description of Artificial Sequence: Synthetic oligonucleotide
gaggcaaggttcagctaag

SEQ ID NO: 7553 - DNA, 19 bp, Artificial Sequence
  Description of Artificial Sequence: Synthetic oligonucleotide
aggcaaggttcagctaagt

SEQ ID NO: 7554 - DNA, 19 bp, Artificial Sequence
  Description of Artificial Sequence: Synthetic oligonucleotide
ggcaaggttcagctaagtc

SEQ ID NO: 7555 - DNA, 19 bp, Artificial Sequence
  Description of Artificial Sequence: Synthetic oligonucleotide
gcaaggttcagctaagtct

SEQ ID NO: 7556 - DNA, 19 bp, Artificial Sequence
  Description of Artificial Sequence: Synthetic oligonucleotide
caaggttcagctaagtctt

SEQ ID NO: 7557 - DNA, 19 bp, Artificial Sequence
  Description of Artificial Sequence: Synthetic oligonucleotide
aaggttcagctaagtcttt

SEQ ID NO: 7558 - DNA, 19 bp, Artificial Sequence
  Description of Artificial Sequence: Synthetic oligonucleotide
aggttcagctaagtctttg

SEQ ID NO: 7559 - DNA, 19 bp, Artificial Sequence
  Description of Artificial Sequence: Synthetic oligonucleotide
ggttcagctaagtctttgt

SEQ ID NO: 7560 - DNA, 19 bp, Artificial Sequence
  Description of Artificial Sequence: Synthetic oligonucleotide
gttcagctaagtctttgtc

SEQ ID NO: 7561 - DNA, 19 bp, Artificial Sequence
  Description of Artificial Sequence: Synthetic oligonucleotide
ttcagctaagtctttgtcc

SEQ ID NO: 7562 - DNA, 19 bp, Artificial Sequence
  Description of Artificial Sequence: Synthetic oligonucleotide
tcagctaagtctttgtccc

SEQ ID NO: 7563 - DNA, 19 bp, Artificial Sequence
  Description of Artificial Sequence: Synthetic oligonucleotide
cagctaagtctttgtccca

SEQ ID NO: 7564 - DNA, 19 bp, Artificial Sequence
  Description of Artificial Sequence: Synthetic oligonucleotide
agctaagtctttgtcccag

SEQ ID NO: 7565 - DNA, 19 bp, Artificial Sequence
  Description of Artificial Sequence: Synthetic oligonucleotide
gctaagtctttgtcccagc

SEQ ID NO: 7566 - DNA, 19 bp, Artificial Sequence
  Description of Artificial Sequence: Synthetic oligonucleotide
ctaagtctttgtcccagcc

SEQ ID NO: 7567 - DNA, 19 bp, Artificial Sequence
  Description of Artificial Sequence: Synthetic oligonucleotide
taagtctttgtcccagcct

SEQ ID NO: 7568 - DNA, 19 bp, Artificial Sequence
  Description of Artificial Sequence: Synthetic oligonucleotide
aagtctttgtcccagcctt

SEQ ID NO: 7569 - DNA, 19 bp, Artificial Sequence
  Description of Artificial Sequence: Synthetic oligonucleotide
agtctttgtcccagcctta

SEQ ID NO: 7570 - DNA, 19 bp, Artificial Sequence
  Description of Artificial Sequence: Synthetic oligonucleotide
gtctttgtcccagccttaa

SEQ ID NO: 7571 - DNA, 19 bp, Artificial Sequence
  Description of Artificial Sequence: Synthetic oligonucleotide
tctttgtcccagccttaat

SEQ ID NO: 7572 - DNA, 19 bp, Artificial Sequence
  Description of Artificial Sequence: Synthetic oligonucleotide
ctttgtcccagccttaatg

SEQ ID NO: 7573 - DNA, 19 bp, Artificial Sequence
  Description of Artificial Sequence: Synthetic oligonucleotide
tttgtcccagccttaatgc

SEQ ID NO: 7574 - DNA, 19 bp, Artificial Sequence
  Description of Artificial Sequence: Synthetic oligonucleotide
ttgtcccagccttaatgct

SEQ ID NO: 7575 - DNA, 19 bp, Artificial Sequence
  Description of Artificial Sequence: Synthetic oligonucleotide
tgtcccagccttaatgcta

SEQ ID NO: 7576 - DNA, 19 bp, Artificial Sequence
  Description of Artificial Sequence: Synthetic oligonucleotide
gtcccagccttaatgctaa

SEQ ID NO: 7577 - DNA, 19 bp, Artificial Sequence
  Description of Artificial Sequence: Synthetic oligonucleotide
tcccagccttaatgctaac

SEQ ID NO: 7578 - DNA, 19 bp, Artificial Sequence
  Description of Artificial Sequence: Synthetic oligonucleotide
cccagccttaatgctaacc

SEQ ID NO: 7579 - DNA, 19 bp, Artificial Sequence
  Description of Artificial Sequence: Synthetic oligonucleotide
ccagccttaatgctaacca

SEQ ID NO: 7580 - DNA, 19 bp, Artificial Sequence
  Description of Artificial Sequence: Synthetic oligonucleotide
cagccttaatgctaaccaa

SEQ ID NO: 7581 - DNA, 19 bp, Artificial Sequence
  Description of Artificial Sequence: Synthetic oligonucleotide
agccttaatgctaaccaac

SEQ ID NO: 7582 - DNA, 19 bp, Artificial Sequence
  Description of Artificial Sequence: Synthetic oligonucleotide
gccttaatgctaaccaaca

SEQ ID NO: 7583 - DNA, 19 bp, Artificial Sequence
  Description of Artificial Sequence: Synthetic oligonucleotide
ccttaatgctaaccaacac

SEQ ID NO: 7584 - DNA, 19 bp, Artificial Sequence
  Description of Artificial Sequence: Synthetic oligonucleotide
cttaatgctaaccaacact

SEQ ID NO: 7585 - DNA, 19 bp, Artificial Sequence
  Description of Artificial Sequence: Synthetic oligonucleotide
ttaatgctaaccaacactt

SEQ ID NO: 7586 - DNA, 19 bp, Artificial Sequence
  Description of Artificial Sequence: Synthetic oligonucleotide
taatgctaaccaacacttt

SEQ ID NO: 7587 - DNA, 19 bp, Artificial Sequence
  Description of Artificial Sequence: Synthetic oligonucleotide
aatgctaaccaacactttc

SEQ ID NO: 7588 - DNA, 19 bp, Artificial Sequence
  Description of Artificial Sequence: Synthetic oligonucleotide
atgctaaccaacactttca

SEQ ID NO: 7589 - DNA, 19 bp, Artificial Sequence
  Description of Artificial Sequence: Synthetic oligonucleotide
tgctaaccaacactttcag

SEQ ID NO: 7590 - DNA, 19 bp, Artificial Sequence
  Description of Artificial Sequence: Synthetic oligonucleotide
gctaaccaacactttcaga

SEQ ID NO: 7591 - DNA, 19 bp, Artificial Sequence
  Description of Artificial Sequence: Synthetic oligonucleotide
ctaaccaacactttcagaa

SEQ ID NO: 7592 - DNA, 19 bp, Artificial Sequence
  Description of Artificial Sequence: Synthetic oligonucleotide
taaccaacactttcagaaa

SEQ ID NO: 7593 - DNA, 19 bp, Artificial Sequence
  Description of Artificial Sequence: Synthetic oligonucleotide
aaccaacactttcagaaat

SEQ ID NO: 7594 - DNA, 19 bp, Artificial Sequence
  Description of Artificial Sequence: Synthetic oligonucleotide
accaacactttcagaaatg

SEQ ID NO: 7595 - DNA, 19 bp, Artificial Sequence
  Description of Artificial Sequence: Synthetic oligonucleotide
ccaacactttcagaaatgt

SEQ ID NO: 7596 - DNA, 19 bp, Artificial Sequence
  Description of Artificial Sequence: Synthetic oligonucleotide
caacactttcagaaatgtt

SEQ ID NO: 7597 - DNA, 19 bp, Artificial Sequence
  Description of Artificial Sequence: Synthetic oligonucleotide
aacactttcagaaatgttg

SEQ ID NO: 7598 - DNA, 19 bp, Artificial Sequence
  Description of Artificial Sequence: Synthetic oligonucleotide
acactttcagaaatgttga

SEQ ID NO: 7599 - DNA, 19 bp, Artificial Sequence
  Description of Artificial Sequence: Synthetic oligonucleotide
cactttcagaaatgttgag

SEQ ID NO: 7600 - DNA, 19 bp, Artificial Sequence
  Description of Artificial Sequence: Synthetic oligonucleotide
actttcagaaatgttgagt

SEQ ID NO: 7601 - DNA, 19 bp, Artificial Sequence
  Description of Artificial Sequence: Synthetic oligonucleotide
ctttcagaaatgttgagta

SEQ ID NO: 7602 - DNA, 19 bp, Artificial Sequence
  Description of Artificial Sequence: Synthetic oligonucleotide
tttcagaaatgttgagtag

SEQ ID NO: 7603 - DNA, 19 bp, Artificial Sequence
  Description of Artificial Sequence: Synthetic oligonucleotide
ttcagaaatgttgagtaga

SEQ ID NO: 7604 - DNA, 19 bp, Artificial Sequence
  Description of Artificial Sequence: Synthetic oligonucleotide
tcagaaatgttgagtagag

SEQ ID NO: 7605 - DNA, 19 bp, Artificial Sequence
  Description of Artificial Sequence: Synthetic oligonucleotide
cagaaatgttgagtagaga

SEQ ID NO: 7606 - DNA, 19 bp, Artificial Sequence
  Description of Artificial Sequence: Synthetic oligonucleotide
agaaatgttgagtagagag

SEQ ID NO: 7607 - DNA, 19 bp, Artificial Sequence
  Description of Artificial Sequence: Synthetic oligonucleotide
gaaatgttgagtagagagg

SEQ ID NO: 7608 - DNA, 19 bp, Artificial Sequence
  Description of Artificial Sequence: Synthetic oligonucleotide
aaatgttgagtagagaggt

SEQ ID NO: 7609 - DNA, 19 bp, Artificial Sequence
  Description of Artificial Sequence: Synthetic oligonucleotide
aatgttgagtagagaggtg

SEQ ID NO: 7610 - DNA, 19 bp, Artificial Sequence
  Description of Artificial Sequence: Synthetic oligonucleotide
atgttgagtagagaggtgt

SEQ ID NO: 7611 - DNA, 19 bp, Artificial Sequence
  Description of Artificial Sequence: Synthetic oligonucleotide
tgttgagtagagaggtgtc

SEQ ID NO: 7612 - DNA, 19 bp, Artificial Sequence
  Description of Artificial Sequence: Synthetic oligonucleotide
gttgagtagagaggtgtcc

SEQ ID NO: 7613 - DNA, 19 bp, Artificial Sequence
  Description of Artificial Sequence: Synthetic oligonucleotide
ttgagtagagaggtgtccc

SEQ ID NO: 7614 - DNA, 19 bp, Artificial Sequence
  Description of Artificial Sequence: Synthetic oligonucleotide
tgagtagagaggtgtccct

SEQ ID NO: 7615 - DNA, 19 bp, Artificial Sequence
  Description of Artificial Sequence: Synthetic oligonucleotide
gagtagagaggtgtcccta

SEQ ID NO: 7616 - DNA, 19 bp, Artificial Sequence
  Description of Artificial Sequence: Synthetic oligonucleotide
agtagagaggtgtccctaa

SEQ ID NO: 7617 - DNA, 19 bp, Artificial Sequence
  Description of Artificial Sequence: Synthetic oligonucleotide
gtagagaggtgtccctaaa

SEQ ID NO: 7618 - DNA, 19 bp, Artificial Sequence
  Description of Artificial Sequence: Synthetic oligonucleotide
tagagaggtgtccctaaag

SEQ ID NO: 7619 - DNA, 19 bp, Artificial Sequence
  Description of Artificial Sequence: Synthetic oligonucleotide
agagaggtgtccctaaagc

SEQ ID NO: 7620 - DNA, 19 bp, Artificial Sequence
  Description of Artificial Sequence: Synthetic oligonucleotide
gagaggtgtccctaaagct

SEQ ID NO: 7621 - DNA, 19 bp, Artificial Sequence
  Description of Artificial Sequence: Synthetic oligonucleotide
agaggtgtccctaaagctt

SEQ ID NO: 7622 - DNA, 19 bp, Artificial Sequence
  Description of Artificial Sequence: Synthetic oligonucleotide
gaggtgtccctaaagcttc

SEQ ID NO: 7623 - DNA, 19 bp, Artificial Sequence
  Description of Artificial Sequence: Synthetic oligonucleotide
aggtgtccctaaagcttca

SEQ ID NO: 7624 - DNA, 19 bp, Artificial Sequence
  Description of Artificial Sequence: Synthetic oligonucleotide
ggtgtccctaaagcttcaa

SEQ ID NO: 7625 - DNA, 19 bp, Artificial Sequence
  Description of Artificial Sequence: Synthetic oligonucleotide
gtgtccctaaagcttcaat

SEQ ID NO: 7626 - DNA, 19 bp, Artificial Sequence
  Description of Artificial Sequence: Synthetic oligonucleotide
tgtccctaaagcttcaatg

SEQ ID NO: 7627 - DNA, 19 bp, Artificial Sequence
  Description of Artificial Sequence: Synthetic oligonucleotide
gtccctaaagcttcaatgg

SEQ ID NO: 7628 - DNA, 19 bp, Artificial Sequence
  Description of Artificial Sequence: Synthetic oligonucleotide
tccctaaagcttcaatgga

SEQ ID NO: 7629 - DNA, 19 bp, Artificial Sequence
  Description of Artificial Sequence: Synthetic oligonucleotide
ccctaaagcttcaatggaa

SEQ ID NO: 7630 - DNA, 19 bp, Artificial Sequence
  Description of Artificial Sequence: Synthetic oligonucleotide
cctaaagcttcaatggaac

SEQ ID NO: 7631 - DNA, 19 bp, Artificial Sequence
  Description of Artificial Sequence: Synthetic oligonucleotide
ctaaagcttcaatggaact

SEQ ID NO: 7632 - DNA, 19 bp, Artificial Sequence
  Description of Artificial Sequence: Synthetic oligonucleotide
taaagcttcaatggaactt

SEQ ID NO: 7633 - DNA, 19 bp, Artificial Sequence
  Description of Artificial Sequence: Synthetic oligonucleotide
aaagcttcaatggaactta

SEQ ID NO: 7634 - DNA, 19 bp, Artificial Sequence
  Description of Artificial Sequence: Synthetic oligonucleotide
aagcttcaatggaacttaa

SEQ ID NO: 7635 - DNA, 19 bp, Artificial Sequence
  Description of Artificial Sequence: Synthetic oligonucleotide
agcttcaatggaacttaaa

SEQ ID NO: 7636 - DNA, 19 bp, Artificial Sequence
  Description of Artificial Sequence: Synthetic oligonucleotide
gcttcaatggaacttaaac

SEQ ID NO: 7637 - DNA, 19 bp, Artificial Sequence
  Description of Artificial Sequence: Synthetic oligonucleotide
cttcaatggaacttaaact

SEQ ID NO: 7638 - DNA, 19 bp, Artificial Sequence
  Description of Artificial Sequence: Synthetic oligonucleotide
ttcaatggaacttaaactc

SEQ ID NO: 7639 - DNA, 19 bp, Artificial Sequence
  Description of Artificial Sequence: Synthetic oligonucleotide
tcaatggaacttaaactct

SEQ ID NO: 7640 - DNA, 19 bp, Artificial Sequence
  Description of Artificial Sequence: Synthetic oligonucleotide
caatggaacttaaactctg

SEQ ID NO: 7641 - DNA, 19 bp, Artificial Sequence
  Description of Artificial Sequence: Synthetic oligonucleotide
aatggaacttaaactctgt

SEQ ID NO: 7642 - DNA, 19 bp, Artificial Sequence
  Description of Artificial Sequence: Synthetic oligonucleotide
atggaacttaaactctgtt

SEQ ID NO: 7643 - DNA, 19 bp, Artificial Sequence
  Description of Artificial Sequence: Synthetic oligonucleotide
tggaacttaaactctgttg

SEQ ID NO: 7644 - DNA, 19 bp, Artificial Sequence
  Description of Artificial Sequence: Synthetic oligonucleotide
ggaacttaaactctgttga

SEQ ID NO: 7645 - DNA, 19 bp, Artificial Sequence
  Description of Artificial Sequence: Synthetic oligonucleotide
gaacttaaactctgttgac

SEQ ID NO: 7646 - DNA, 19 bp, Artificial Sequence
  Description of Artificial Sequence: Synthetic oligonucleotide
aacttaaactctgttgaca

SEQ ID NO: 7647 - DNA, 19 bp, Artificial Sequence
  Description of Artificial Sequence: Synthetic oligonucleotide
acttaaactctgttgacaa

SEQ ID NO: 7648 - DNA, 19 bp, Artificial Sequence
  Description of Artificial Sequence: Synthetic oligonucleotide
cttaaactctgttgacaag

SEQ ID NO: 7649 - DNA, 19 bp, Artificial Sequence
  Description of Artificial Sequence: Synthetic oligonucleotide
ttaaactctgttgacaagc

SEQ ID NO: 7650 - DNA, 19 bp, Artificial Sequence
  Description of Artificial Sequence: Synthetic oligonucleotide
taaactctgttgacaagcg

SEQ ID NO: 7651 - DNA, 19 bp, Artificial Sequence
  Description of Artificial Sequence: Synthetic oligonucleotide
aaactctgttgacaagcga

SEQ ID NO: 7652 - DNA, 19 bp, Artificial Sequence
  Description of Artificial Sequence: Synthetic oligonucleotide
aactctgttgacaagcgag

SEQ ID NO: 7653 - DNA, 19 bp, Artificial Sequence
  Description of Artificial Sequence: Synthetic oligonucleotide
actctgttgacaagcgagt

SEQ ID NO: 7654 - DNA, 19 bp, Artificial Sequence
  Description of Artificial Sequence: Synthetic oligonucleotide
ctctgttgacaagcgagtg

SEQ ID NO: 7655 - DNA, 19 bp, Artificial Sequence
  Description of Artificial Sequence: Synthetic oligonucleotide
tctgttgacaagcgagtgc

SEQ ID NO: 7656 - DNA, 19 bp, Artificial Sequence
  Description of Artificial Sequence: Synthetic oligonucleotide
ctgttgacaagcgagtgcc

SEQ ID NO: 7657 - DNA, 19 bp, Artificial Sequence
  Description of Artificial Sequence: Synthetic oligonucleotide
tgttgacaagcgagtgccg

SEQ ID NO: 7658 - DNA, 19 bp, Artificial Sequence
  Description of Artificial Sequence: Synthetic oligonucleotide
gttgacaagcgagtgccgg

SEQ ID NO: 7659 - DNA, 19 bp, Artificial Sequence
  Description of Artificial Sequence: Synthetic oligonucleotide
ttgacaagcgagtgccggt

SEQ ID NO: 7660 - DNA, 19 bp, Artificial Sequence
  Description of Artificial Sequence: Synthetic oligonucleotide
tgacaagcgagtgccggtt

SEQ ID NO: 7661 - DNA, 19 bp, Artificial Sequence
  Description of Artificial Sequence: Synthetic oligonucleotide
gacaagcgagtgccggttt

SEQ ID NO: 7662 - DNA, 19 bp, Artificial Sequence
  Description of Artificial Sequence: Synthetic oligonucleotide
acaagcgagtgccggtttt

SEQ ID NO: 7663 - DNA, 19 bp, Artificial Sequence
  Description of Artificial Sequence: Synthetic oligonucleotide
caagcgagtgccggttttc

SEQ ID NO: 7664 - DNA, 19 bp, Artificial Sequence
  Description of Artificial Sequence: Synthetic oligonucleotide
aagcgagtgccggttttca

SEQ ID NO: 7665 - DNA, 19 bp, Artificial Sequence
  Description of Artificial Sequence: Synthetic oligonucleotide
agcgagtgccggttttcac

SEQ ID NO: 7666 - DNA, 19 bp, Artificial Sequence
  Description of Artificial Sequence: Synthetic oligonucleotide
gcgagtgccggttttcact

SEQ ID NO: 7667 - DNA, 19 bp, Artificial Sequence
  Description of Artificial Sequence: Synthetic oligonucleotide
cgagtgccggttttcactt

SEQ ID NO: 7668 - DNA, 19 bp, Artificial Sequence
  Description of Artificial Sequence: Synthetic oligonucleotide
gagtgccggttttcacttg

SEQ ID NO: 7669 - DNA, 19 bp, Artificial Sequence
  Description of Artificial Sequence: Synthetic oligonucleotide
agtgccggttttcacttgt

SEQ ID NO: 7670 - DNA, 19 bp, Artificial Sequence
  Description of Artificial Sequence: Synthetic oligonucleotide
gtgccggttttcacttgtt

SEQ ID NO: 7671 - DNA, 19 bp, Artificial Sequence
  Description of Artificial Sequence: Synthetic oligonucleotide
tgccggttttcacttgttg

SEQ ID NO: 7672 - DNA, 19 bp, Artificial Sequence
  Description of Artificial Sequence: Synthetic oligonucleotide
gccggttttcacttgttga

SEQ ID NO: 7673 - DNA, 19 bp, Artificial Sequence
  Description of Artificial Sequence: Synthetic oligonucleotide
ccggttttcacttgttgag

SEQ ID NO: 7674 - DNA, 19 bp, Artificial Sequence
  Description of Artificial Sequence: Synthetic oligonucleotide
cggttttcacttgttgaga

SEQ ID NO: 7675 - DNA, 19 bp, Artificial Sequence
  Description of Artificial Sequence: Synthetic oligonucleotide
ggttttcacttgttgagaa

SEQ ID NO: 7676 - DNA, 19 bp, Artificial Sequence
  Description of Artificial Sequence: Synthetic oligonucleotide
gttttcacttgttgagaag

SEQ ID NO: 7677 - DNA, 19 bp, Artificial Sequence
  Description of Artificial Sequence: Synthetic oligonucleotide
ttttcacttgttgagaaga

SEQ ID NO: 7678 - DNA, 19 bp, Artificial Sequence
  Description of Artificial Sequence: Synthetic oligonucleotide
tttcacttgttgagaagag

SEQ ID NO: 7679 - DNA, 19 bp, Artificial Sequence
  Description of Artificial Sequence: Synthetic oligonucleotide
ttcacttgttgagaagaga

SEQ ID NO: 7680 - DNA, 19 bp, Artificial Sequence
  Description of Artificial Sequence: Synthetic oligonucleotide
tcacttgttgagaagagat

SEQ ID NO: 7681 - DNA, 19 bp, Artificial Sequence
  Description of Artificial Sequence: Synthetic oligonucleotide
cacttgttgagaagagatg

SEQ ID NO: 7682 - DNA, 19 bp, Artificial Sequence
  Description of Artificial Sequence: Synthetic oligonucleotide
acttgttgagaagagatgt

SEQ ID NO: 7683 - DNA, 19 bp, Artificial Sequence
  Description of Artificial Sequence: Synthetic oligonucleotide
cttgttgagaagagatgtg

SEQ ID NO: 7684 - DNA, 19 bp, Artificial Sequence
  Description of Artificial Sequence: Synthetic oligonucleotide
ttgttgagaagagatgtgt

SEQ ID NO: 7685 - DNA, 19 bp, Artificial Sequence
  Description of Artificial Sequence: Synthetic oligonucleotide
tgttgagaagagatgtgtg

SEQ ID NO: 7686 - DNA, 19 bp, Artificial Sequence
  Description of Artificial Sequence: Synthetic oligonucleotide
gttgagaagagatgtgtgc

SEQ ID NO: 7687 - DNA, 19 bp, Artificial Sequence
  Description of Artificial Sequence: Synthetic oligonucleotide
ttgagaagagatgtgtgcc

SEQ ID NO: 7688 - DNA, 19 bp, Artificial Sequence
  Description of Artificial Sequence: Synthetic oligonucleotide
tgagaagagatgtgtgcca

SEQ ID NO: 7689 - DNA, 19 bp, Artificial Sequence
  Description of Artificial Sequence: Synthetic oligonucleotide
gagaagagatgtgtgccat

SEQ ID NO: 7690 - DNA, 19 bp, Artificial Sequence
  Description of Artificial Sequence: Synthetic oligonucleotide
agaagagatgtgtgccata

SEQ ID NO: 7691 - DNA, 19 bp, Artificial Sequence
  Description of Artificial Sequence: Synthetic oligonucleotide
gaagagatgtgtgccatat

SEQ ID NO: 7692 - DNA, 19 bp, Artificial Sequence
  Description of Artificial Sequence: Synthetic oligonucleotide
aagagatgtgtgccatata

SEQ ID NO: 7693 - DNA, 19 bp, Artificial Sequence
  Description of Artificial Sequence: Synthetic oligonucleotide
agagatgtgtgccatatac

SEQ ID NO: 7694 - DNA, 19 bp, Artificial Sequence
  Description of Artificial Sequence: Synthetic oligonucleotide
gagatgtgtgccatatact

SEQ ID NO: 7695 - DNA, 19 bp, Artificial Sequence
  Description of Artificial Sequence: Synthetic oligonucleotide
agatgtgtgccatatactt

SEQ ID NO: 7696 - DNA, 19 bp, Artificial Sequence
  Description of Artificial Sequence: Synthetic oligonucleotide
gatgtgtgccatatacttg

SEQ ID NO: 7697 - DNA, 19 bp, Artificial Sequence
  Description of Artificial Sequence: Synthetic oligonucleotide
atgtgtgccatatacttgg

SEQ ID NO: 7698 - DNA, 19 bp, Artificial Sequence
  Description of Artificial Sequence: Synthetic oligonucleotide
tgtgtgccatatacttggt

SEQ ID NO: 7699 - DNA, 19 bp, Artificial Sequence
  Description of Artificial Sequence: Synthetic oligonucleotide
gtgtgccatatacttggtt

SEQ ID NO: 7700 - DNA, 19 bp, Artificial Sequence
  Description of Artificial Sequence: Synthetic oligonucleotide
tgtgccatatacttggttt

SEQ ID NO: 7701 - DNA, 19 bp, Artificial Sequence
  Description of Artificial Sequence: Synthetic oligonucleotide
gtgccatatacttggtttg

SEQ ID NO: 7702 - DNA, 19 bp, Artificial Sequence
  Description of Artificial Sequence: Synthetic oligonucleotide
tgccatatacttggtttgg

SEQ ID NO: 7703 - DNA, 19 bp, Artificial Sequence
  Description of Artificial Sequence: Synthetic oligonucleotide
gccatatacttggtttggt

SEQ ID NO: 7704 - DNA, 19 bp, Artificial Sequence
  Description of Artificial Sequence: Synthetic oligonucleotide
ccatatacttggtttggtg

SEQ ID NO: 7705 - DNA, 19 bp, Artificial Sequence
  Description of Artificial Sequence: Synthetic oligonucleotide
catatacttggtttggtgg

SEQ ID NO: 7706 - DNA, 19 bp, Artificial Sequence
  Description of Artificial Sequence: Synthetic oligonucleotide
atatacttggtttggtggc

SEQ ID NO: 7707 - DNA, 19 bp, Artificial Sequence
  Description of Artificial Sequence: Synthetic oligonucleotide
tatacttggtttggtggct

SEQ ID NO: 7708 - DNA, 19 bp, Artificial Sequence
  Description of Artificial Sequence: Synthetic oligonucleotide
atacttggtttggtggcta

SEQ ID NO: 7709 - DNA, 19 bp, Artificial Sequence
  Description of Artificial Sequence: Synthetic oligonucleotide
tacttggtttggtggctac

SEQ ID NO: 7710 - DNA, 19 bp, Artificial Sequence
  Description of Artificial Sequence: Synthetic oligonucleotide
acttggtttggtggctaca

SEQ ID NO: 7711 - DNA, 19 bp, Artificial Sequence
  Description of Artificial Sequence: Synthetic oligonucleotide
cttggtttggtggctacag

SEQ ID NO: 7712 - DNA, 19 bp, Artificial Sequence
  Description of Artificial Sequence: Synthetic oligonucleotide
ttggtttggtggctacaga

SEQ ID NO: 7713 - DNA, 19 bp, Artificial Sequence
  Description of Artificial Sequence: Synthetic oligonucleotide
tggtttggtggctacagag

SEQ ID NO: 7714 - DNA, 19 bp, Artificial Sequence
  Description of Artificial Sequence: Synthetic oligonucleotide
ggtttggtggctacagagt

SEQ ID NO: 7715 - DNA, 19 bp, Artificial Sequence
  Description of Artificial Sequence: Synthetic oligonucleotide
gtttggtggctacagagta

SEQ ID NO: 7716 - DNA, 19 bp, Artificial Sequence
  Description of Artificial Sequence: Synthetic oligonucleotide
tttggtggctacagagtac

SEQ ID NO: 7717 - DNA, 19 bp, Artificial Sequence
  Description of Artificial Sequence: Synthetic oligonucleotide
ttggtggctacagagtaca

SEQ ID NO: 7718 - DNA, 19 bp, Artificial Sequence
  Description of Artificial Sequence: Synthetic oligonucleotide
tggtggctacagagtacag

SEQ ID NO: 7719 - DNA, 19 bp, Artificial Sequence
  Description of Artificial Sequence: Synthetic oligonucleotide
ggtggctacagagtacagc

SEQ ID NO: 7720 - DNA, 19 bp, Artificial Sequence
  Description of Artificial Sequence: Synthetic oligonucleotide
gtggctacagagtacagcc

SEQ ID NO: 7721 - DNA, 19 bp, Artificial Sequence
  Description of Artificial Sequence: Synthetic oligonucleotide
tggctacagagtacagcct

SEQ ID NO: 7722 - DNA, 19 bp, Artificial Sequence
  Description of Artificial Sequence: Synthetic oligonucleotide
ggctacagagtacagcctg

SEQ ID NO: 7723 - DNA, 19 bp, Artificial Sequence
  Description of Artificial Sequence: Synthetic oligonucleotide
gctacagagtacagcctgc

SEQ ID NO: 7724 - DNA, 19 bp, Artificial Sequence
  Description of Artificial Sequence: Synthetic oligonucleotide
ctacagagtacagcctgct

SEQ ID NO: 7725 - DNA, 19 bp, Artificial Sequence
  Description of Artificial Sequence: Synthetic oligonucleotide
tacagagtacagcctgctg

SEQ ID NO: 7726 - DNA, 19 bp, Artificial Sequence
  Description of Artificial Sequence: Synthetic oligonucleotide
acagagtacagcctgctgc

SEQ ID NO: 7727 - DNA, 19 bp, Artificial Sequence
  Description of Artificial Sequence: Synthetic oligonucleotide
cagagtacagcctgctgct

SEQ ID NO: 7728 - DNA, 19 bp, Artificial Sequence
  Description of Artificial Sequence: Synthetic oligonucleotide
agagtacagcctgctgctt

SEQ ID NO: 7729 - DNA, 19 bp, Artificial Sequence
  Description of Artificial Sequence: Synthetic oligonucleotide
gagtacagcctgctgctta

SEQ ID NO: 7730 - DNA, 19 bp, Artificial Sequence
  Description of Artificial Sequence: Synthetic oligonucleotide
agtacagcctgctgcttaa

SEQ ID NO: 7731 - DNA, 19 bp, Artificial Sequence
  Description of Artificial Sequence: Synthetic oligonucleotide
gtacagcctgctgcttaac

SEQ ID NO: 7732 - DNA, 19 bp, Artificial Sequence
  Description of Artificial Sequence: Synthetic oligonucleotide
tacagcctgctgcttaacc

SEQ ID NO: 7733 - DNA, 19 bp, Artificial Sequence
  Description of Artificial Sequence: Synthetic oligonucleotide
acagcctgctgcttaaccc

SEQ ID NO: 7734 - DNA, 19 bp, Artificial Sequence
  Description of Artificial Sequence: Synthetic oligonucleotide
cagcctgctgcttaaccct

SEQ ID NO: 7735 - DNA, 19 bp, Artificial Sequence
  Description of Artificial Sequence: Synthetic oligonucleotide
agcctgctgcttaaccctc

SEQ ID NO: 7736 - DNA, 19 bp, Artificial Sequence
  Description of Artificial Sequence: Synthetic oligonucleotide
gcctgctgcttaaccctca

SEQ ID NO: 7737 - DNA, 19 bp, Artificial Sequence
  Description of Artificial Sequence: Synthetic oligonucleotide
cctgctgcttaaccctcag

SEQ ID NO: 7738 - DNA, 19 bp, Artificial Sequence
  Description of Artificial Sequence: Synthetic oligonucleotide
ctgctgcttaaccctcaga

SEQ ID NO: 7739 - DNA, 19 bp, Artificial Sequence
  Description of Artificial Sequence: Synthetic oligonucleotide
tgctgcttaaccctcagag

SEQ ID NO: 7740 - DNA, 19 bp, Artificial Sequence
  Description of Artificial Sequence: Synthetic oligonucleotide
gctgcttaaccctcagagg

SEQ ID NO: 7741 - DNA, 19 bp, Artificial Sequence
  Description of Artificial Sequence: Synthetic oligonucleotide
ctgcttaaccctcagagga

SEQ ID NO: 7742 - DNA, 19 bp, Artificial Sequence
  Description of Artificial Sequence: Synthetic oligonucleotide
tgcttaaccctcagaggag

SEQ ID NO: 7743 - DNA, 19 bp, Artificial Sequence
  Description of Artificial Sequence: Synthetic oligonucleotide
gcttaaccctcagaggaga

SEQ ID NO: 7744 - DNA, 19 bp, Artificial Sequence
  Description of Artificial Sequence: Synthetic oligonucleotide
cttaaccctcagaggagac

SEQ ID NO: 7745 - DNA, 19 bp, Artificial Sequence
  Description of Artificial Sequence: Synthetic oligonucleotide
ttaaccctcagaggagact

SEQ ID NO: 7746 - DNA, 19 bp, Artificial Sequence
  Description of Artificial Sequence: Synthetic oligonucleotide
taaccctcagaggagactg

SEQ ID NO: 7747 - DNA, 19 bp, Artificial Sequence
  Description of Artificial Sequence: Synthetic oligonucleotide
aaccctcagaggagactga

SEQ ID NO: 7748 - DNA, 19 bp, Artificial Sequence
  Description of Artificial Sequence: Synthetic oligonucleotide
accctcagaggagactgat

SEQ ID NO: 7749 - DNA, 19 bp, Artificial Sequence
  Description of Artificial Sequence: Synthetic oligonucleotide
ccctcagaggagactgatc

SEQ ID NO: 7750 - DNA, 19 bp, Artificial Sequence
  Description of Artificial Sequence: Synthetic oligonucleotide
cctcagaggagactgatcc

SEQ ID NO: 7751 - DNA, 19 bp, Artificial Sequence
  Description of Artificial Sequence: Synthetic oligonucleotide
ctcagaggagactgatcca

SEQ ID NO: 7752 - DNA, 19 bp, Artificial Sequence
  Description of Artificial Sequence: Synthetic oligonucleotide
tcagaggagactgatccag

SEQ ID NO: 7753 - DNA, 19 bp, Artificial Sequence
  Description of Artificial Sequence: Synthetic oligonucleotide
cagaggagactgatccagt

SEQ ID NO: 7754 - DNA, 19 bp, Artificial Sequence
  Description of Artificial Sequence: Synthetic oligonucleotide
agaggagactgatccagtt

SEQ ID NO: 7755 - DNA, 19 bp, Artificial Sequence
  Description of Artificial Sequence: Synthetic oligonucleotide
gaggagactgatccagttg

SEQ ID NO: 7756 - DNA, 19 bp, Artificial Sequence
  Description of Artificial Sequence: Synthetic oligonucleotide
aggagactgatccagttgg

SEQ ID NO: 7757 - DNA, 19 bp, Artificial Sequence
  Description of Artificial Sequence: Synthetic oligonucleotide
ggagactgatccagttggg

SEQ ID NO: 7758 - DNA, 19 bp, Artificial Sequence
  Description of Artificial Sequence: Synthetic oligonucleotide
gagactgatccagttggga

SEQ ID NO: 7759 - DNA, 19 bp, Artificial Sequence
  Description of Artificial Sequence: Synthetic oligonucleotide
agactgatccagttgggaa

SEQ ID NO: 7760 - DNA, 19 bp, Artificial Sequence
  Description of Artificial Sequence: Synthetic oligonucleotide
gactgatccagttgggaaa

SEQ ID NO: 7761 - DNA, 19 bp, Artificial Sequence
  Description of Artificial Sequence: Synthetic oligonucleotide
actgatccagttgggaaat

SEQ ID NO: 7762 - DNA, 19 bp, Artificial Sequence
  Description of Artificial Sequence: Synthetic oligonucleotide
ctgatccagttgggaaatt

SEQ ID NO: 7763 - DNA, 19 bp, Artificial Sequence
  Description of Artificial Sequence: Synthetic oligonucleotide
tgatccagttgggaaattc

SEQ ID NO: 7764 - DNA, 19 bp, Artificial Sequence
  Description of Artificial Sequence: Synthetic oligonucleotide
gatccagttgggaaattca

SEQ ID NO: 7765 - DNA, 19 bp, Artificial Sequence
  Description of Artificial Sequence: Synthetic oligonucleotide
atccagttgggaaattcag

SEQ ID NO: 7766 - DNA, 19 bp, Artificial Sequence
  Description of Artificial Sequence: Synthetic oligonucleotide
tccagttgggaaattcaga

SEQ ID NO: 7767 - DNA, 19 bp, Artificial Sequence
  Description of Artificial Sequence: Synthetic oligonucleotide
ccagttgggaaattcagag

SEQ ID NO: 7768 - DNA, 19 bp, Artificial Sequence
  Description of Artificial Sequence: Synthetic oligonucleotide
cagttgggaaattcagagc

SEQ ID NO: 7769 - DNA, 19 bp, Artificial Sequence
  Description of Artificial Sequence: Synthetic oligonucleotide
agttgggaaattcagagca

SEQ ID NO: 7770 - DNA, 19 bp, Artificial Sequence
  Description of Artificial Sequence: Synthetic oligonucleotide
gttgggaaattcagagcag

SEQ ID NO: 7771 - DNA, 19 bp, Artificial Sequence
  Description of Artificial Sequence: Synthetic oligonucleotide
ttgggaaattcagagcagc

SEQ ID NO: 7772 - DNA, 19 bp, Artificial Sequence
  Description of Artificial Sequence: Synthetic oligonucleotide
tgggaaattcagagcagct

SEQ ID NO: 7773 - DNA, 19 bp, Artificial Sequence
  Description of Artificial Sequence: Synthetic oligonucleotide
gggaaattcagagcagctc

SEQ ID NO: 7774 - DNA, 19 bp, Artificial Sequence
  Description of Artificial Sequence: Synthetic oligonucleotide
ggaaattcagagcagctcc

SEQ ID NO: 7775 - DNA, 19 bp, Artificial Sequence
  Description of Artificial Sequence: Synthetic oligonucleotide
gaaattcagagcagctcct

SEQ ID NO: 7776 - DNA, 19 bp, Artificial Sequence
  Description of Artificial Sequence: Synthetic oligonucleotide
aaattcagagcagctcctg

SEQ ID NO: 7777 - DNA, 19 bp, Artificial Sequence
  Description of Artificial Sequence: Synthetic oligonucleotide
aattcagagcagctcctgc

SEQ ID NO: 7778 - DNA, 19 bp, Artificial Sequence
  Description of Artificial Sequence: Synthetic oligonucleotide
attcagagcagctcctgct

SEQ ID NO: 7779 - DNA, 19 bp, Artificial Sequence
  Description of Artificial Sequence: Synthetic oligonucleotide
ttcagagcagctcctgctc

SEQ ID NO: 7780 - DNA, 19 bp, Artificial Sequence
  Description of Artificial Sequence: Synthetic oligonucleotide
tcagagcagctcctgctcc

SEQ ID NO: 7781 - DNA, 19 bp, Artificial Sequence
  Description of Artificial Sequence: Synthetic oligonucleotide
cagagcagctcctgctcca

SEQ ID NO: 7782 - DNA, 19 bp, Artificial Sequence
  Description of Artificial Sequence: Synthetic oligonucleotide
agagcagctcctgctccag

SEQ ID NO: 7783 - DNA, 19 bp, Artificial Sequence
  Description of Artificial Sequence: Synthetic oligonucleotide
gagcagctcctgctccagg

SEQ ID NO: 7784 - DNA, 19 bp, Artificial Sequence
  Description of Artificial Sequence: Synthetic oligonucleotide
agcagctcctgctccaggc

SEQ ID NO: 7785 - DNA, 19 bp, Artificial Sequence
  Description of Artificial Sequence: Synthetic oligonucleotide
gcagctcctgctccaggca

SEQ ID NO: 7786 - DNA, 19 bp, Artificial Sequence
  Description of Artificial Sequence: Synthetic oligonucleotide
cagctcctgctccaggcag

SEQ ID NO: 7787 - DNA, 19 bp, Artificial Sequence
  Description of Artificial Sequence: Synthetic oligonucleotide
agctcctgctccaggcagc

SEQ ID NO: 7788 - DNA, 19 bp, Artificial Sequence
  Description of Artificial Sequence: Synthetic oligonucleotide
gctcctgctccaggcagcc

SEQ ID NO: 7789 - DNA, 19 bp, Artificial Sequence
  Description of Artificial Sequence: Synthetic oligonucleotide
ctcctgctccaggcagcca

SEQ ID NO: 7790 - DNA, 19 bp, Artificial Sequence
  Description of Artificial Sequence: Synthetic oligonucleotide
tcctgctccaggcagccag

SEQ ID NO: 7791 - DNA, 19 bp, Artificial Sequence
  Description of Artificial Sequence: Synthetic oligonucleotide
cctgctccaggcagccaga

SEQ ID NO: 7792 - DNA, 19 bp, Artificial Sequence
  Description of Artificial Sequence: Synthetic oligonucleotide
ctgctccaggcagccagaa

SEQ ID NO: 7793 - DNA, 19 bp, Artificial Sequence
  Description of Artificial Sequence: Synthetic oligonucleotide
tgctccaggcagccagaag

SEQ ID NO: 7794 - DNA, 19 bp, Artificial Sequence
  Description of Artificial Sequence: Synthetic oligonucleotide
gctccaggcagccagaagc

SEQ ID NO: 7795 - DNA, 19 bp, Artificial Sequence
  Description of Artificial Sequence: Synthetic oligonucleotide
ctccaggcagccagaagca

SEQ ID NO: 7796 - DNA, 19 bp, Artificial Sequence
  Description of Artificial Sequence: Synthetic oligonucleotide
tccaggcagccagaagcag

SEQ ID NO: 7797 - DNA, 19 bp, Artificial Sequence
  Description of Artificial Sequence: Synthetic oligonucleotide
ccaggcagccagaagcagc

SEQ ID NO: 7798 - DNA, 19 bp, Artificial Sequence
  Description of Artificial Sequence: Synthetic oligonucleotide
caggcagccagaagcagca

SEQ ID NO: 7799 - DNA, 19 bp, Artificial Sequence
  Description of Artificial Sequence: Synthetic oligonucleotide
aggcagccagaagcagcag

SEQ ID NO: 7800 - DNA, 19 bp, Artificial Sequence
  Description of Artificial Sequence: Synthetic oligonucleotide
ggcagccagaagcagcagt

SEQ ID NO: 7801 - DNA, 19 bp, Artificial Sequence
  Description of Artificial Sequence: Synthetic oligonucleotide
gcagccagaagcagcagtg

SEQ ID NO: 7802 - DNA, 19 bp, Artificial Sequence
  Description of Artificial Sequence: Synthetic oligonucleotide
cagccagaagcagcagtgg

SEQ ID NO: 7803 - DNA, 19 bp, Artificial Sequence
  Description of Artificial Sequence: Synthetic oligonucleotide
agccagaagcagcagtggg

SEQ ID NO: 7804 - DNA, 19 bp, Artificial Sequence
  Description of Artificial Sequence: Synthetic oligonucleotide
gccagaagcagcagtgggg

SEQ ID NO: 7805 - DNA, 19 bp, Artificial Sequence
  Description of Artificial Sequence: Synthetic oligonucleotide
ccagaagcagcagtggggg

SEQ ID NO: 7806 - DNA, 19 bp, Artificial Sequence
  Description of Artificial Sequence: Synthetic oligonucleotide
cagaagcagcagtgggggg

SEQ ID NO: 7807 - DNA, 19 bp, Artificial Sequence
  Description of Artificial Sequence: Synthetic oligonucleotide
agaagcagcagtggggggt

SEQ ID NO: 7808 - DNA, 19 bp, Artificial Sequence
  Description of Artificial Sequence: Synthetic oligonucleotide
gaagcagcagtggggggtg

SEQ ID NO: 7809 - DNA, 19 bp, Artificial Sequence
  Description of Artificial Sequence: Synthetic oligonucleotide
aagcagcagtggggggtgg

SEQ ID NO: 7810 - DNA, 19 bp, Artificial Sequence
  Description of Artificial Sequence: Synthetic oligonucleotide
agcagcagtggggggtggg

SEQ ID NO: 7811 - DNA, 19 bp, Artificial Sequence
  Description of Artificial Sequence: Synthetic oligonucleotide
gcagcagtggggggtgggg

SEQ ID NO: 7812 - DNA, 19 bp, Artificial Sequence
  Description of Artificial Sequence: Synthetic oligonucleotide
cagcagtggggggtggggg

SEQ ID NO: 7813 - DNA, 19 bp, Artificial Sequence
  Description of Artificial Sequence: Synthetic oligonucleotide
agcagtggggggtgggggt

SEQ ID NO: 7814 - DNA, 19 bp, Artificial Sequence
  Description of Artificial Sequence: Synthetic oligonucleotide
gcagtggggggtgggggtg

SEQ ID NO: 7815 - DNA, 19 bp, Artificial Sequence
  Description of Artificial Sequence: Synthetic oligonucleotide
cagtggggggtgggggtgg

SEQ ID NO: 7816 - DNA, 19 bp, Artificial Sequence
  Description of Artificial Sequence: Synthetic oligonucleotide
agtggggggtgggggtggg

SEQ ID NO: 7817 - DNA, 19 bp, Artificial Sequence
  Description of Artificial Sequence: Synthetic oligonucleotide
gtggggggtgggggtgggg

SEQ ID NO: 7818 - DNA, 19 bp, Artificial Sequence
  Description of Artificial Sequence: Synthetic oligonucleotide
tggggggtgggggtgggga

SEQ ID NO: 7819 - DNA, 19 bp, Artificial Sequence
  Description of Artificial Sequence: Synthetic oligonucleotide
ggggggtgggggtggggat

SEQ ID NO: 7820 - DNA, 19 bp, Artificial Sequence
  Description of Artificial Sequence: Synthetic oligonucleotide
gggggtgggggtggggatt

SEQ ID NO: 7821 - DNA, 19 bp, Artificial Sequence
  Description of Artificial Sequence: Synthetic oligonucleotide
ggggtgggggtggggattc

SEQ ID NO: 7822 - DNA, 19 bp, Artificial Sequence
  Description of Artificial Sequence: Synthetic oligonucleotide
gggtgggggtggggattcc

SEQ ID NO: 7823 - DNA, 19 bp, Artificial Sequence
  Description of Artificial Sequence: Synthetic oligonucleotide
ggtgggggtggggattcct

SEQ ID NO: 7824 - DNA, 19 bp, Artificial Sequence
  Description of Artificial Sequence: Synthetic oligonucleotide
gtgggggtggggattcctt

SEQ ID NO: 7825 - DNA, 19 bp, Artificial Sequence
  Description of Artificial Sequence: Synthetic oligonucleotide
tgggggtggggattccttg

SEQ ID NO: 7826 - DNA, 19 bp, Artificial Sequence
  Description of Artificial Sequence: Synthetic oligonucleotide
gggggtggggattccttgt

SEQ ID NO: 7827 - DNA, 19 bp, Artificial Sequence
  Description of Artificial Sequence: Synthetic oligonucleotide
ggggtggggattccttgtg

SEQ ID NO: 7828 - DNA, 19 bp, Artificial Sequence
  Description of Artificial Sequence: Synthetic oligonucleotide
gggtggggattccttgtgt

SEQ ID NO: 7829 - DNA, 19 bp, Artificial Sequence
  Description of Artificial Sequence: Synthetic oligonucleotide
ggtggggattccttgtgtt

SEQ ID NO: 7830 - DNA, 19 bp, Artificial Sequence
  Description of Artificial Sequence: Synthetic oligonucleotide
gtggggattccttgtgtta

SEQ ID NO: 7831 - DNA, 19 bp, Artificial Sequence
  Description of Artificial Sequence: Synthetic oligonucleotide
tggggattccttgtgttaa

SEQ ID NO: 7832 - DNA, 19 bp, Artificial Sequence
  Description of Artificial Sequence: Synthetic oligonucleotide
ggggattccttgtgttaag

SEQ ID NO: 7833 - DNA, 19 bp, Artificial Sequence
  Description of Artificial Sequence: Synthetic oligonucleotide
gggattccttgtgttaagt

SEQ ID NO: 7834 - DNA, 19 bp, Artificial Sequence
  Description of Artificial Sequence: Synthetic oligonucleotide
ggattccttgtgttaagtg

SEQ ID NO: 7835 - DNA, 19 bp, Artificial Sequence
  Description of Artificial Sequence: Synthetic oligonucleotide
gattccttgtgttaagtgc

SEQ ID NO: 7836 - DNA, 19 bp, Artificial Sequence
  Description of Artificial Sequence: Synthetic oligonucleotide
attccttgtgttaagtgcc

SEQ ID NO: 7837 - DNA, 19 bp, Artificial Sequence
  Description of Artificial Sequence: Synthetic oligonucleotide
ttccttgtgttaagtgcca

SEQ ID NO: 7838 - DNA, 19 bp, Artificial Sequence
  Description of Artificial Sequence: Synthetic oligonucleotide
tccttgtgttaagtgccac

SEQ ID NO: 7839 - DNA, 19 bp, Artificial Sequence
  Description of Artificial Sequence: Synthetic oligonucleotide
ccttgtgttaagtgccaca

SEQ ID NO: 7840 - DNA, 19 bp, Artificial Sequence
  Description of Artificial Sequence: Synthetic oligonucleotide
cttgtgttaagtgccacac

SEQ ID NO: 7841 - DNA, 19 bp, Artificial Sequence
  Description of Artificial Sequence: Synthetic oligonucleotide
ttgtgttaagtgccacaca

SEQ ID NO: 7842 - DNA, 19 bp, Artificial Sequence
  Description of Artificial Sequence: Synthetic oligonucleotide
tgtgttaagtgccacacaa

SEQ ID NO: 7843 - DNA, 19 bp, Artificial Sequence
  Description of Artificial Sequence: Synthetic oligonucleotide
gtgttaagtgccacacaac

SEQ ID NO: 7844 - DNA, 19 bp, Artificial Sequence
  Description of Artificial Sequence: Synthetic oligonucleotide
tgttaagtgccacacaact

SEQ ID NO: 7845 - DNA, 19 bp, Artificial Sequence
  Description of Artificial Sequence: Synthetic oligonucleotide
gttaagtgccacacaactg

SEQ ID NO: 7846 - DNA, 19 bp, Artificial Sequence
  Description of Artificial Sequence: Synthetic oligonucleotide
ttaagtgccacacaactga

SEQ ID NO: 7847 - DNA, 19 bp, Artificial Sequence
  Description of Artificial Sequence: Synthetic oligonucleotide
taagtgccacacaactgac

SEQ ID NO: 7848 - DNA, 19 bp, Artificial Sequence
  Description of Artificial Sequence: Synthetic oligonucleotide
aagtgccacacaactgaca

SEQ ID NO: 7849 - DNA, 19 bp, Artificial Sequence
  Description of Artificial Sequence: Synthetic oligonucleotide
agtgccacacaactgacaa

SEQ ID NO: 7850 - DNA, 19 bp, Artificial Sequence
  Description of Artificial Sequence: Synthetic oligonucleotide
gtgccacacaactgacaag

SEQ ID NO: 7851 - DNA, 19 bp, Artificial Sequence
  Description of Artificial Sequence: Synthetic oligonucleotide
tgccacacaactgacaagg

SEQ ID NO: 7852 - DNA, 19 bp, Artificial Sequence
  Description of Artificial Sequence: Synthetic oligonucleotide
gccacacaactgacaagga

SEQ ID NO: 7853 - DNA, 19 bp, Artificial Sequence
  Description of Artificial Sequence: Synthetic oligonucleotide
ccacacaactgacaaggag

SEQ ID NO: 7854 - DNA, 19 bp, Artificial Sequence
  Description of Artificial Sequence: Synthetic oligonucleotide
cacacaactgacaaggaga

SEQ ID NO: 7855 - DNA, 19 bp, Artificial Sequence
  Description of Artificial Sequence: Synthetic oligonucleotide
acacaactgacaaggagat

SEQ ID NO: 7856 - DNA, 19 bp, Artificial Sequence
  Description of Artificial Sequence: Synthetic oligonucleotide
cacaactgacaaggagatc

SEQ ID NO: 7857 - DNA, 19 bp, Artificial Sequence
  Description of Artificial Sequence: Synthetic oligonucleotide
acaactgacaaggagatct

SEQ ID NO: 7858 - DNA, 19 bp, Artificial Sequence
  Description of Artificial Sequence: Synthetic oligonucleotide
caactgacaaggagatctg

SEQ ID NO: 7859 - DNA, 19 bp, Artificial Sequence
  Description of Artificial Sequence: Synthetic oligonucleotide
aactgacaaggagatctgt

SEQ ID NO: 7860 - DNA, 19 bp, Artificial Sequence
  Description of Artificial Sequence: Synthetic oligonucleotide
actgacaaggagatctgtg

SEQ ID NO: 7861 - DNA, 19 bp, Artificial Sequence
  Description of Artificial Sequence: Synthetic oligonucleotide
ctgacaaggagatctgtgg

SEQ ID NO: 7862 - DNA, 19 bp, Artificial Sequence
  Description of Artificial Sequence: Synthetic oligonucleotide
tgacaaggagatctgtgga

SEQ ID NO: 7863 - DNA, 19 bp, Artificial Sequence
  Description of Artificial Sequence: Synthetic oligonucleotide
gacaaggagatctgtggag

SEQ ID NO: 7864 - DNA, 19 bp, Artificial Sequence
  Description of Artificial Sequence: Synthetic oligonucleotide
acaaggagatctgtggagt

SEQ ID NO: 7865 - DNA, 19 bp, Artificial Sequence
  Description of Artificial Sequence: Synthetic oligonucleotide
caaggagatctgtggagtt

SEQ ID NO: 7866 - DNA, 19 bp, Artificial Sequence
  Description of Artificial Sequence: Synthetic oligonucleotide
aaggagatctgtggagttt

SEQ ID NO: 7867 - DNA, 19 bp, Artificial Sequence
  Description of Artificial Sequence: Synthetic oligonucleotide
aggagatctgtggagtttt

SEQ ID NO: 7868 - DNA, 19 bp, Artificial Sequence
  Description of Artificial Sequence: Synthetic oligonucleotide
ggagatctgtggagttttt

SEQ ID NO: 7869 - DNA, 19 bp, Artificial Sequence
  Description of Artificial Sequence: Synthetic oligonucleotide
gagatctgtggagtttttc

SEQ ID NO: 7870 - DNA, 19 bp, Artificial Sequence
  Description of Artificial Sequence: Synthetic oligonucleotide
agatctgtggagtttttct

SEQ ID NO: 7871 - DNA, 19 bp, Artificial Sequence
  Description of Artificial Sequence: Synthetic oligonucleotide
gatctgtggagtttttctc

SEQ ID NO: 7872 - DNA, 19 bp, Artificial Sequence
  Description of Artificial Sequence: Synthetic oligonucleotide
atctgtggagtttttctcc

SEQ ID NO: 7873 - DNA, 19 bp, Artificial Sequence
  Description of Artificial Sequence: Synthetic oligonucleotide
tctgtggagtttttctcca

SEQ ID NO: 7874 - DNA, 19 bp, Artificial Sequence
  Description of Artificial Sequence: Synthetic oligonucleotide
ctgtggagtttttctccaa

SEQ ID NO: 7875 - DNA, 19 bp, Artificial Sequence
  Description of Artificial Sequence: Synthetic oligonucleotide
tgtggagtttttctccaag

SEQ ID NO: 7876 - DNA, 19 bp, Artificial Sequence
  Description of Artificial Sequence: Synthetic oligonucleotide
gtggagtttttctccaagt

SEQ ID NO: 7877 - DNA, 19 bp, Artificial Sequence
  Description of Artificial Sequence: Synthetic oligonucleotide
tggagtttttctccaagtg

SEQ ID NO: 7878 - DNA, 19 bp, Artificial Sequence
  Description of Artificial Sequence: Synthetic oligonucleotide
ggagtttttctccaagtga

SEQ ID NO: 7879 - DNA, 19 bp, Artificial Sequence
  Description of Artificial Sequence: Synthetic oligonucleotide
gagtttttctccaagtgaa

SEQ ID NO: 7880 - DNA, 19 bp, Artificial Sequence
  Description of Artificial Sequence: Synthetic oligonucleotide
agtttttctccaagtgaac

SEQ ID NO: 7881 - DNA, 19 bp, Artificial Sequence
  Description of Artificial Sequence: Synthetic oligonucleotide
gtttttctccaagtgaacc

SEQ ID NO: 7882 - DNA, 19 bp, Artificial Sequence
  Description of Artificial Sequence: Synthetic oligonucleotide
tttttctccaagtgaacca

SEQ ID NO: 7883 - DNA, 19 bp, Artificial Sequence
  Description of Artificial Sequence: Synthetic oligonucleotide
ttttctccaagtgaaccaa

SEQ ID NO: 7884 - DNA, 19 bp, Artificial Sequence
  Description of Artificial Sequence: Synthetic oligonucleotide
tttctccaagtgaaccaat

SEQ ID NO: 7885 - DNA, 19 bp, Artificial Sequence
  Description of Artificial Sequence: Synthetic oligonucleotide
ttctccaagtgaaccaatc

SEQ ID NO: 7886 - DNA, 19 bp, Artificial Sequence
  Description of Artificial Sequence: Synthetic oligonucleotide
tctccaagtgaaccaatcc

SEQ ID NO: 7887 - DNA, 19 bp, Artificial Sequence
  Description of Artificial Sequence: Synthetic oligonucleotide
ctccaagtgaaccaatccc

SEQ ID NO: 7888 - DNA, 19 bp, Artificial Sequence
  Description of Artificial Sequence: Synthetic oligonucleotide
tccaagtgaaccaatcccc

SEQ ID NO: 7889 - DNA, 19 bp, Artificial Sequence
  Description of Artificial Sequence: Synthetic oligonucleotide
ccaagtgaaccaatcccct

SEQ ID NO: 7890 - DNA, 19 bp, Artificial Sequence
  Description of Artificial Sequence: Synthetic oligonucleotide
caagtgaaccaatcccctg

SEQ ID NO: 7891 - DNA, 19 bp, Artificial Sequence
  Description of Artificial Sequence: Synthetic oligonucleotide
aagtgaaccaatcccctgt

SEQ ID NO: 7892 - DNA, 19 bp, Artificial Sequence
  Description of Artificial Sequence: Synthetic oligonucleotide
agtgaaccaatcccctgtg

SEQ ID NO: 7893 - DNA, 19 bp, Artificial Sequence
  Description of Artificial Sequence: Synthetic oligonucleotide
gtgaaccaatcccctgtgt

SEQ ID NO: 7894 - DNA, 19 bp, Artificial Sequence
  Description of Artificial Sequence: Synthetic oligonucleotide
tgaaccaatcccctgtgtc

SEQ ID NO: 7895 - DNA, 19 bp, Artificial Sequence
  Description of Artificial Sequence: Synthetic oligonucleotide
gaaccaatcccctgtgtcc

SEQ ID NO: 7896 - DNA, 19 bp, Artificial Sequence
  Description of Artificial Sequence: Synthetic oligonucleotide
aaccaatcccctgtgtcct

SEQ ID NO: 7897 - DNA, 19 bp, Artificial Sequence
  Description of Artificial Sequence: Synthetic oligonucleotide
accaatcccctgtgtcctg

SEQ ID NO: 7898 - DNA, 19 bp, Artificial Sequence
  Description of Artificial Sequence: Synthetic oligonucleotide
ccaatcccctgtgtcctgg

SEQ ID NO: 7899 - DNA, 19 bp, Artificial Sequence
  Description of Artificial Sequence: Synthetic oligonucleotide
caatcccctgtgtcctggc

SEQ ID NO: 7900 - DNA, 19 bp, Artificial Sequence
  Description of Artificial Sequence: Synthetic oligonucleotide
aatcccctgtgtcctggct

SEQ ID NO: 7901 - DNA, 19 bp, Artificial Sequence
  Description of Artificial Sequence: Synthetic oligonucleotide
atcccctgtgtcctggctc

SEQ ID NO: 7902 - DNA, 19 bp, Artificial Sequence
  Description of Artificial Sequence: Synthetic oligonucleotide
tcccctgtgtcctggctca

SEQ ID NO: 7903 - DNA, 19 bp, Artificial Sequence
  Description of Artificial Sequence: Synthetic oligonucleotide
cccctgtgtcctggctcac

SEQ ID NO: 7904 - DNA, 19 bp, Artificial Sequence
  Description of Artificial Sequence: Synthetic oligonucleotide
ccctgtgtcctggctcaca

SEQ ID NO: 7905 - DNA, 19 bp, Artificial Sequence
  Description of Artificial Sequence: Synthetic oligonucleotide
cctgtgtcctggctcacac

SEQ ID NO: 7906 - DNA, 19 bp, Artificial Sequence
  Description of Artificial Sequence: Synthetic oligonucleotide
ctgtgtcctggctcacact

SEQ ID NO: 7907 - DNA, 19 bp, Artificial Sequence
  Description of Artificial Sequence: Synthetic oligonucleotide
tgtgtcctggctcacactg

SEQ ID NO: 7908 - DNA, 19 bp, Artificial Sequence
  Description of Artificial Sequence: Synthetic oligonucleotide
gtgtcctggctcacactgt

SEQ ID NO: 7909 - DNA, 19 bp, Artificial Sequence
  Description of Artificial Sequence: Synthetic oligonucleotide
tgtcctggctcacactgtg

SEQ ID NO: 7910 - DNA, 19 bp, Artificial Sequence
  Description of Artificial Sequence: Synthetic oligonucleotide
gtcctggctcacactgtgg

SEQ ID NO: 7911 - DNA, 19 bp, Artificial Sequence
  Description of Artificial Sequence: Synthetic oligonucleotide
tcctggctcacactgtggt

SEQ ID NO: 7912 - DNA, 19 bp, Artificial Sequence
  Description of Artificial Sequence: Synthetic oligonucleotide
cctggctcacactgtggtt

SEQ ID NO: 7913 - DNA, 19 bp, Artificial Sequence
  Description of Artificial Sequence: Synthetic oligonucleotide
ctggctcacactgtggtta

SEQ ID NO: 7914 - DNA, 19 bp, Artificial Sequence
  Description of Artificial Sequence: Synthetic oligonucleotide
tggctcacactgtggttag

SEQ ID NO: 7915 - DNA, 19 bp, Artificial Sequence
  Description of Artificial Sequence: Synthetic oligonucleotide
ggctcacactgtggttagg

SEQ ID NO: 7916 - DNA, 19 bp, Artificial Sequence
  Description of Artificial Sequence: Synthetic oligonucleotide
gctcacactgtggttaggg

SEQ ID NO: 7917 - DNA, 19 bp, Artificial Sequence
  Description of Artificial Sequence: Synthetic oligonucleotide
ctcacactgtggttagggt

SEQ ID NO: 7918 - DNA, 19 bp, Artificial Sequence
  Description of Artificial Sequence: Synthetic oligonucleotide
tcacactgtggttagggtg

SEQ ID NO: 7919 - DNA, 19 bp, Artificial Sequence
  Description of Artificial Sequence: Synthetic oligonucleotide
cacactgtggttagggtgg

SEQ ID NO: 7920 - DNA, 19 bp, Artificial Sequence
  Description of Artificial Sequence: Synthetic oligonucleotide
acactgtggttagggtggg

SEQ ID NO: 7921 - DNA, 19 bp, Artificial Sequence
  Description of Artificial Sequence: Synthetic oligonucleotide
cactgtggttagggtgggc

SEQ ID NO: 7922 - DNA, 19 bp, Artificial Sequence
  Description of Artificial Sequence: Synthetic oligonucleotide
actgtggttagggtgggca

SEQ ID NO: 7923 - DNA, 19 bp, Artificial Sequence
  Description of Artificial Sequence: Synthetic oligonucleotide
ctgtggttagggtgggcac

SEQ ID NO: 7924 - DNA, 19 bp, Artificial Sequence
  Description of Artificial Sequence: Synthetic oligonucleotide
tgtggttagggtgggcaca

SEQ ID NO: 7925 - DNA, 19 bp, Artificial Sequence
  Description of Artificial Sequence: Synthetic oligonucleotide
gtggttagggtgggcacat

SEQ ID NO: 7926 - DNA, 19 bp, Artificial Sequence
  Description of Artificial Sequence: Synthetic oligonucleotide
tggttagggtgggcacatc

SEQ ID NO: 7927 - DNA, 19 bp, Artificial Sequence
  Description of Artificial Sequence: Synthetic oligonucleotide
ggttagggtgggcacatcc

SEQ ID NO: 7928 - DNA, 19 bp, Artificial Sequence
  Description of Artificial Sequence: Synthetic oligonucleotide
gttagggtgggcacatcca

SEQ ID NO: 7929 - DNA, 19 bp, Artificial Sequence
  Description of Artificial Sequence: Synthetic oligonucleotide
ttagggtgggcacatccac

SEQ ID NO: 7930 - DNA, 19 bp, Artificial Sequence
  Description of Artificial Sequence: Synthetic oligonucleotide
tagggtgggcacatccact

SEQ ID NO: 7931 - DNA, 19 bp, Artificial Sequence
  Description of Artificial Sequence: Synthetic oligonucleotide
agggtgggcacatccactc

SEQ ID NO: 7932 - DNA, 19 bp, Artificial Sequence
  Description of Artificial Sequence: Synthetic oligonucleotide
gggtgggcacatccactct

SEQ ID NO: 7933 - DNA, 19 bp, Artificial Sequence
  Description of Artificial Sequence: Synthetic oligonucleotide
ggtgggcacatccactctg

SEQ ID NO: 7934 - DNA, 19 bp, Artificial Sequence
  Description of Artificial Sequence: Synthetic oligonucleotide
gtgggcacatccactctgc

SEQ ID NO: 7935 - DNA, 19 bp, Artificial Sequence
  Description of Artificial Sequence: Synthetic oligonucleotide
tgggcacatccactctgcc

SEQ ID NO: 7936 - DNA, 19 bp, Artificial Sequence
  Description of Artificial Sequence: Synthetic oligonucleotide
gggcacatccactctgcca

SEQ ID NO: 7937 - DNA, 19 bp, Artificial Sequence
  Description of Artificial Sequence: Synthetic oligonucleotide
ggcacatccactctgccat

SEQ ID NO: 7938 - DNA, 19 bp, Artificial Sequence
  Description of Artificial Sequence: Synthetic oligonucleotide
gcacatccactctgccatc

SEQ ID NO: 7939 - DNA, 19 bp, Artificial Sequence
  Description of Artificial Sequence: Synthetic oligonucleotide
cacatccactctgccatct

SEQ ID NO: 7940 - DNA, 19 bp, Artificial Sequence
  Description of Artificial Sequence: Synthetic oligonucleotide
acatccactctgccatctt

SEQ ID NO: 7941 - DNA, 19 bp, Artificial Sequence
  Description of Artificial Sequence: Synthetic oligonucleotide
catccactctgccatcttt

SEQ ID NO: 7942 - DNA, 19 bp, Artificial Sequence
  Description of Artificial Sequence: Synthetic oligonucleotide
atccactctgccatcttta

SEQ ID NO: 7943 - DNA, 19 bp, Artificial Sequence
  Description of Artificial Sequence: Synthetic oligonucleotide
tccactctgccatctttaa

SEQ ID NO: 7944 - DNA, 19 bp, Artificial Sequence
  Description of Artificial Sequence: Synthetic oligonucleotide
ccactctgccatctttaac

SEQ ID NO: 7945 - DNA, 19 bp, Artificial Sequence
  Description of Artificial Sequence: Synthetic oligonucleotide
cactctgccatctttaaca

SEQ ID NO: 7946 - DNA, 19 bp, Artificial Sequence
  Description of Artificial Sequence: Synthetic oligonucleotide
actctgccatctttaacac

SEQ ID NO: 7947 - DNA, 19 bp, Artificial Sequence
  Description of Artificial Sequence: Synthetic oligonucleotide
ctctgccatctttaacaca

SEQ ID NO: 7948 - DNA, 19 bp, Artificial Sequence
  Description of Artificial Sequence: Synthetic oligonucleotide
tctgccatctttaacacac

SEQ ID NO: 7949 - DNA, 19 bp, Artificial Sequence
  Description of Artificial Sequence: Synthetic oligonucleotide
cccatgaccttagatgaga

SEQ ID NO: 7950 - DNA, 19 bp, Artificial Sequence
  Description of Artificial Sequence: Synthetic oligonucleotide
acccatgaccttagatgag

SEQ ID NO: 7951 - DNA, 19 bp, Artificial Sequence
  Description of Artificial Sequence: Synthetic oligonucleotide
cacccatgaccttagatga

SEQ ID NO: 7952 - DNA, 19 bp, Artificial Sequence
  Description of Artificial Sequence: Synthetic oligonucleotide
ccacccatgaccttagatg

SEQ ID NO: 7953 - DNA, 19 bp, Artificial Sequence
  Description of Artificial Sequence: Synthetic oligonucleotide
gccacccatgaccttagat

SEQ ID NO: 7954 - DNA, 19 bp, Artificial Sequence
  Description of Artificial Sequence: Synthetic oligonucleotide
tgccacccatgaccttaga

SEQ ID NO: 7955 - DNA, 19 bp, Artificial Sequence
  Description of Artificial Sequence: Synthetic oligonucleotide
gtgccacccatgaccttag

SEQ ID NO: 7956 - DNA, 19 bp, Artificial Sequence
  Description of Artificial Sequence: Synthetic oligonucleotide
cgtgccacccatgacctta

SEQ ID NO: 7957 - DNA, 19 bp, Artificial Sequence
  Description of Artificial Sequence: Synthetic oligonucleotide
ccgtgccacccatgacctt

SEQ ID NO: 7958 - DNA, 19 bp, Artificial Sequence
  Description of Artificial Sequence: Synthetic oligonucleotide
tccgtgccacccatgacct

SEQ ID NO: 7959 - DNA, 19 bp, Artificial Sequence
  Description of Artificial Sequence: Synthetic oligonucleotide
ctccgtgccacccatgacc

SEQ ID NO: 7960 - DNA, 19 bp, Artificial Sequence
  Description of Artificial Sequence: Synthetic oligonucleotide
actccgtgccacccatgac

SEQ ID NO: 7961 - DNA, 19 bp, Artificial Sequence
  Description of Artificial Sequence: Synthetic oligonucleotide
aactccgtgccacccatga

SEQ ID NO: 7962 - DNA, 19 bp, Artificial Sequence
  Description of Artificial Sequence: Synthetic oligonucleotide
aaactccgtgccacccatg

SEQ ID NO: 7963 - DNA, 19 bp, Artificial Sequence
  Description of Artificial Sequence: Synthetic oligonucleotide
caaactccgtgccacccat

SEQ ID NO: 7964 - DNA, 19 bp, Artificial Sequence
  Description of Artificial Sequence: Synthetic oligonucleotide
acaaactccgtgccaccca

SEQ ID NO: 7965 - DNA, 19 bp, Artificial Sequence
  Description of Artificial Sequence: Synthetic oligonucleotide
cacaaactccgtgccaccc

SEQ ID NO: 7966 - DNA, 19 bp, Artificial Sequence
  Description of Artificial Sequence: Synthetic oligonucleotide
acacaaactccgtgccacc

SEQ ID NO: 7967 - DNA, 19 bp, Artificial Sequence
  Description of Artificial Sequence: Synthetic oligonucleotide
aacacaaactccgtgccac

SEQ ID NO: 7968 - DNA, 19 bp, Artificial Sequence
  Description of Artificial Sequence: Synthetic oligonucleotide
gaacacaaactccgtgcca

SEQ ID NO: 7969 - DNA, 19 bp, Artificial Sequence
  Description of Artificial Sequence: Synthetic oligonucleotide
tgaacacaaactccgtgcc

SEQ ID NO: 7970 - DNA, 19 bp, Artificial Sequence
  Description of Artificial Sequence: Synthetic oligonucleotide
ttgaacacaaactccgtgc

SEQ ID NO: 7971 - DNA, 19 bp, Artificial Sequence
  Description of Artificial Sequence: Synthetic oligonucleotide
tttgaacacaaactccgtg

SEQ ID NO: 7972 - DNA, 19 bp, Artificial Sequence
  Description of Artificial Sequence: Synthetic oligonucleotide
ctttgaacacaaactccgt

SEQ ID NO: 7973 - DNA, 19 bp, Artificial Sequence
  Description of Artificial Sequence: Synthetic oligonucleotide
actttgaacacaaactccg

SEQ ID NO: 7974 - DNA, 19 bp, Artificial Sequence
  Description of Artificial Sequence: Synthetic oligonucleotide
cactttgaacacaaactcc

SEQ ID NO: 7975 - DNA, 19 bp, Artificial Sequence
  Description of Artificial Sequence: Synthetic oligonucleotide
tcactttgaacacaaactc

SEQ ID NO: 7976 - DNA, 19 bp, Artificial Sequence
  Description of Artificial Sequence: Synthetic oligonucleotide
ttcactttgaacacaaact

SEQ ID NO: 7977 - DNA, 19 bp, Artificial Sequence
  Description of Artificial Sequence: Synthetic oligonucleotide
attcactttgaacacaaac

SEQ ID NO: 7978 - DNA, 19 bp, Artificial Sequence
  Description of Artificial Sequence: Synthetic oligonucleotide
gattcactttgaacacaaa

SEQ ID NO: 7979 - DNA, 19 bp, Artificial Sequence
  Description of Artificial Sequence: Synthetic oligonucleotide
tgattcactttgaacacaa

SEQ ID NO: 7980 - DNA, 19 bp, Artificial Sequence
  Description of Artificial Sequence: Synthetic oligonucleotide
gtgattcactttgaacaca

SEQ ID NO: 7981 - DNA, 19 bp, Artificial Sequence
  Description of Artificial Sequence: Synthetic oligonucleotide
tgtgattcactttgaacac

SEQ ID NO: 7982 - DNA, 19 bp, Artificial Sequence
  Description of Artificial Sequence: Synthetic oligonucleotide
atgtgattcactttgaaca

SEQ ID NO: 7983 - DNA, 19 bp, Artificial Sequence
  Description of Artificial Sequence: Synthetic oligonucleotide
catgtgattcactttgaac

SEQ ID NO: 7984 - DNA, 19 bp, Artificial Sequence
  Description of Artificial Sequence: Synthetic oligonucleotide
tcatgtgattcactttgaa

SEQ ID NO: 7985 - DNA, 19 bp, Artificial Sequence
  Description of Artificial Sequence: Synthetic oligonucleotide
ttcatgtgattcactttga

SEQ ID NO: 7986 - DNA, 19 bp, Artificial Sequence
  Description of Artificial Sequence: Synthetic oligonucleotide
cttcatgtgattcactttg

SEQ ID NO: 7987 - DNA, 19 bp, Artificial Sequence
  Description of Artificial Sequence: Synthetic oligonucleotide
ccttcatgtgattcacttt

SEQ ID NO: 7988 - DNA, 19 bp, Artificial Sequence
  Description of Artificial Sequence: Synthetic oligonucleotide
accttcatgtgattcactt

SEQ ID NO: 7989 - DNA, 19 bp, Artificial Sequence
  Description of Artificial Sequence: Synthetic oligonucleotide
aaccttcatgtgattcact

SEQ ID NO: 7990 - DNA, 19 bp, Artificial Sequence
  Description of Artificial Sequence: Synthetic oligonucleotide
taaccttcatgtgattcac

SEQ ID NO: 7991 - DNA, 19 bp, Artificial Sequence
  Description of Artificial Sequence: Synthetic oligonucleotide
gtaaccttcatgtgattca

SEQ ID NO: 7992 - DNA, 19 bp, Artificial Sequence
  Description of Artificial Sequence: Synthetic oligonucleotide
agtaaccttcatgtgattc

SEQ ID NO: 7993 - DNA, 19 bp, Artificial Sequence
  Description of Artificial Sequence: Synthetic oligonucleotide
gagtaaccttcatgtgatt

SEQ ID NO: 7994 - DNA, 19 bp, Artificial Sequence
  Description of Artificial Sequence: Synthetic oligonucleotide
ggagtaaccttcatgtgat

SEQ ID NO: 7995 - DNA, 19 bp, Artificial Sequence
  Description of Artificial Sequence: Synthetic oligonucleotide
gggagtaaccttcatgtga

SEQ ID NO: 7996 - DNA, 19 bp, Artificial Sequence
  Description of Artificial Sequence: Synthetic oligonucleotide
tgggagtaaccttcatgtg

SEQ ID NO: 7997 - DNA, 19 bp, Artificial Sequence
  Description of Artificial Sequence: Synthetic oligonucleotide
atgggagtaaccttcatgt

SEQ ID NO: 7998 - DNA, 19 bp, Artificial Sequence
  Description of Artificial Sequence: Synthetic oligonucleotide
catgggagtaaccttcatg

SEQ ID NO: 7999 - DNA, 19 bp, Artificial Sequence
  Description of Artificial Sequence: Synthetic oligonucleotide
ccatgggagtaaccttcat

SEQ ID NO: 8000 - DNA, 19 bp, Artificial Sequence
  Description of Artificial Sequence: Synthetic oligonucleotide
tccatgggagtaaccttca

SEQ ID NO: 8001 - DNA, 19 bp, Artificial Sequence
  Description of Artificial Sequence: Synthetic oligonucleotide
gtccatgggagtaaccttc

SEQ ID NO: 8002 - DNA, 19 bp, Artificial Sequence
  Description of Artificial Sequence: Synthetic oligonucleotide
cgtccatgggagtaacctt

SEQ ID NO: 8003 - DNA, 19 bp, Artificial Sequence
  Description of Artificial Sequence: Synthetic oligonucleotide
gcgtccatgggagtaacct

SEQ ID NO: 8004 - DNA, 19 bp, Artificial Sequence
  Description of Artificial Sequence: Synthetic oligonucleotide
tgcgtccatgggagtaacc

SEQ ID NO: 8005 - DNA, 19 bp, Artificial Sequence
  Description of Artificial Sequence: Synthetic oligonucleotide
ctgcgtccatgggagtaac

SEQ ID NO: 8006 - DNA, 19 bp, Artificial Sequence
  Description of Artificial Sequence: Synthetic oligonucleotide
gctgcgtccatgggagtaa

SEQ ID NO: 8007 - DNA, 19 bp, Artificial Sequence
  Description of Artificial Sequence: Synthetic oligonucleotide
ggctgcgtccatgggagta

SEQ ID NO: 8008 - DNA, 19 bp, Artificial Sequence
  Description of Artificial Sequence: Synthetic oligonucleotide
tggctgcgtccatgggagt

SEQ ID NO: 8009 - DNA, 19 bp, Artificial Sequence
  Description of Artificial Sequence: Synthetic oligonucleotide
gtggctgcgtccatgggag

SEQ ID NO: 8010 - DNA, 19 bp, Artificial Sequence
  Description of Artificial Sequence: Synthetic oligonucleotide
tgtggctgcgtccatggga

SEQ ID NO: 8011 - DNA, 19 bp, Artificial Sequence
  Description of Artificial Sequence: Synthetic oligonucleotide
ctgtggctgcgtccatggg

SEQ ID NO: 8012 - DNA, 19 bp, Artificial Sequence
  Description of Artificial Sequence: Synthetic oligonucleotide
gctgtggctgcgtccatgg

SEQ ID NO: 8013 - DNA, 19 bp, Artificial Sequence
  Description of Artificial Sequence: Synthetic oligonucleotide
ggctgtggctgcgtccatg

SEQ ID NO: 8014 - DNA, 19 bp, Artificial Sequence
  Description of Artificial Sequence: Synthetic oligonucleotide
aggctgtggctgcgtccat

SEQ ID NO: 8015 - DNA, 19 bp, Artificial Sequence
  Description of Artificial Sequence: Synthetic oligonucleotide
gaggctgtggctgcgtcca

SEQ ID NO: 8016 - DNA, 19 bp, Artificial Sequence
  Description of Artificial Sequence: Synthetic oligonucleotide
ggaggctgtggctgcgtcc

SEQ ID NO: 8017 - DNA, 19 bp, Artificial Sequence
  Description of Artificial Sequence: Synthetic oligonucleotide
gggaggctgtggctgcgtc

SEQ ID NO: 8018 - DNA, 19 bp, Artificial Sequence
  Description of Artificial Sequence: Synthetic oligonucleotide
agggaggctgtggctgcgt

SEQ ID NO: 8019 - DNA, 19 bp, Artificial Sequence
  Description of Artificial Sequence: Synthetic oligonucleotide
gagggaggctgtggctgcg

SEQ ID NO: 8020 - DNA, 19 bp, Artificial Sequence
  Description of Artificial Sequence: Synthetic oligonucleotide
ggagggaggctgtggctgc

SEQ ID NO: 8021 - DNA, 19 bp, Artificial Sequence
  Description of Artificial Sequence: Synthetic oligonucleotide
aggagggaggctgtggctg

SEQ ID NO: 8022 - DNA, 19 bp, Artificial Sequence
  Description of Artificial Sequence: Synthetic oligonucleotide
gaggagggaggctgtggct

SEQ ID NO: 8023 - DNA, 19 bp, Artificial Sequence
  Description of Artificial Sequence: Synthetic oligonucleotide
tgaggagggaggctgtggc

SEQ ID NO: 8024 - DNA, 19 bp, Artificial Sequence
  Description of Artificial Sequence: Synthetic oligonucleotide
ttgaggagggaggctgtgg

SEQ ID NO: 8025 - DNA, 19 bp, Artificial Sequence
  Description of Artificial Sequence: Synthetic oligonucleotide
attgaggagggaggctgtg

SEQ ID NO: 8026 - DNA, 19 bp, Artificial Sequence
  Description of Artificial Sequence: Synthetic oligonucleotide
cattgaggagggaggctgt

SEQ ID NO: 8027 - DNA, 19 bp, Artificial Sequence
  Description of Artificial Sequence: Synthetic oligonucleotide
acattgaggagggaggctg

SEQ ID NO: 8028 - DNA, 19 bp, Artificial Sequence
  Description of Artificial Sequence: Synthetic oligonucleotide
gacattgaggagggaggct

SEQ ID NO: 8029 - DNA, 19 bp, Artificial Sequence
  Description of Artificial Sequence: Synthetic oligonucleotide
agacattgaggagggaggc

SEQ ID NO: 8030 - DNA, 19 bp, Artificial Sequence
  Description of Artificial Sequence: Synthetic oligonucleotide
aagacattgaggagggagg

SEQ ID NO: 8031 - DNA, 19 bp, Artificial Sequence
  Description of Artificial Sequence: Synthetic oligonucleotide
gaagacattgaggagggag

SEQ ID NO: 8032 - DNA, 19 bp, Artificial Sequence
  Description of Artificial Sequence: Synthetic oligonucleotide
tgaagacattgaggaggga

SEQ ID NO: 8033 - DNA, 19 bp, Artificial Sequence
  Description of Artificial Sequence: Synthetic oligonucleotide
ctgaagacattgaggaggg

SEQ ID NO: 8034 - DNA, 19 bp, Artificial Sequence
  Description of Artificial Sequence: Synthetic oligonucleotide
actgaagacattgaggagg

SEQ ID NO: 8035 - DNA, 19 bp, Artificial Sequence
  Description of Artificial Sequence: Synthetic oligonucleotide
cactgaagacattgaggag

SEQ ID NO: 8036 - DNA, 19 bp, Artificial Sequence
  Description of Artificial Sequence: Synthetic oligonucleotide
ccactgaagacattgagga

SEQ ID NO: 8037 - DNA, 19 bp, Artificial Sequence
  Description of Artificial Sequence: Synthetic oligonucleotide
cccactgaagacattgagg

SEQ ID NO: 8038 - DNA, 19 bp, Artificial Sequence
  Description of Artificial Sequence: Synthetic oligonucleotide
tcccactgaagacattgag

SEQ ID NO: 8039 - DNA, 19 bp, Artificial Sequence
  Description of Artificial Sequence: Synthetic oligonucleotide
ttcccactgaagacattga

SEQ ID NO: 8040 - DNA, 19 bp, Artificial Sequence
  Description of Artificial Sequence: Synthetic oligonucleotide
attcccactgaagacattg

SEQ ID NO: 8041 - DNA, 19 bp, Artificial Sequence
  Description of Artificial Sequence: Synthetic oligonucleotide
cattcccactgaagacatt

SEQ ID NO: 8042 - DNA, 19 bp, Artificial Sequence
  Description of Artificial Sequence: Synthetic oligonucleotide
tcattcccactgaagacat

SEQ ID NO: 8043 - DNA, 19 bp, Artificial Sequence
  Description of Artificial Sequence: Synthetic oligonucleotide
ctcattcccactgaagaca

SEQ ID NO: 8044 - DNA, 19 bp, Artificial Sequence
  Description of Artificial Sequence: Synthetic oligonucleotide
actcattcccactgaagac

SEQ ID NO: 8045 - DNA, 19 bp, Artificial Sequence
  Description of Artificial Sequence: Synthetic oligonucleotide
cactcattcccactgaaga

SEQ ID NO: 8046 - DNA, 19 bp, Artificial Sequence
  Description of Artificial Sequence: Synthetic oligonucleotide
acactcattcccactgaag

SEQ ID NO: 8047 - DNA, 19 bp, Artificial Sequence
  Description of Artificial Sequence: Synthetic oligonucleotide
cacactcattcccactgaa

SEQ ID NO: 8048 - DNA, 19 bp, Artificial Sequence
  Description of Artificial Sequence: Synthetic oligonucleotide
ccacactcattcccactga

SEQ ID NO: 8049 - DNA, 19 bp, Artificial Sequence
  Description of Artificial Sequence: Synthetic oligonucleotide
cccacactcattcccactg

SEQ ID NO: 8050 - DNA, 19 bp, Artificial Sequence
  Description of Artificial Sequence: Synthetic oligonucleotide
ccccacactcattcccact

SEQ ID NO: 8051 - DNA, 19 bp, Artificial Sequence
  Description of Artificial Sequence: Synthetic oligonucleotide
gccccacactcattcccac

SEQ ID NO: 8052 - DNA, 19 bp, Artificial Sequence
  Description of Artificial Sequence: Synthetic oligonucleotide
agccccacactcattccca

SEQ ID NO: 8053 - DNA, 19 bp, Artificial Sequence
  Description of Artificial Sequence: Synthetic oligonucleotide
cagccccacactcattccc

SEQ ID NO: 8054 - DNA, 19 bp, Artificial Sequence
  Description of Artificial Sequence: Synthetic oligonucleotide
tcagccccacactcattcc

SEQ ID NO: 8055 - DNA, 19 bp, Artificial Sequence
  Description of Artificial Sequence: Synthetic oligonucleotide
ctcagccccacactcattc

SEQ ID NO: 8056 - DNA, 19 bp, Artificial Sequence
  Description of Artificial Sequence: Synthetic oligonucleotide
cctcagccccacactcatt

SEQ ID NO: 8057 - DNA, 19 bp, Artificial Sequence
  Description of Artificial Sequence: Synthetic oligonucleotide
ccctcagccccacactcat

SEQ ID NO: 8058 - DNA, 19 bp, Artificial Sequence
  Description of Artificial Sequence: Synthetic oligonucleotide
gccctcagccccacactca

SEQ ID NO: 8059 - DNA, 19 bp, Artificial Sequence
  Description of Artificial Sequence: Synthetic oligonucleotide
agccctcagccccacactc

SEQ ID NO: 8060 - DNA, 19 bp, Artificial Sequence
  Description of Artificial Sequence: Synthetic oligonucleotide
gagccctcagccccacact

SEQ ID NO: 8061 - DNA, 19 bp, Artificial Sequence
  Description of Artificial Sequence: Synthetic oligonucleotide
ggagccctcagccccacac

SEQ ID NO: 8062 - DNA, 19 bp, Artificial Sequence
  Description of Artificial Sequence: Synthetic oligonucleotide
aggagccctcagccccaca

SEQ ID NO: 8063 - DNA, 19 bp, Artificial Sequence
  Description of Artificial Sequence: Synthetic oligonucleotide
caggagccctcagccccac

SEQ ID NO: 8064 - DNA, 19 bp, Artificial Sequence
  Description of Artificial Sequence: Synthetic oligonucleotide
ccaggagccctcagcccca

SEQ ID NO: 8065 - DNA, 19 bp, Artificial Sequence
  Description of Artificial Sequence: Synthetic oligonucleotide
gccaggagccctcagcccc

SEQ ID NO: 8066 - DNA, 19 bp, Artificial Sequence
  Description of Artificial Sequence: Synthetic oligonucleotide
tgccaggagccctcagccc

SEQ ID NO: 8067 - DNA, 19 bp, Artificial Sequence
  Description of Artificial Sequence: Synthetic oligonucleotide
ctgccaggagccctcagcc

SEQ ID NO: 8068 - DNA, 19 bp, Artificial Sequence
  Description of Artificial Sequence: Synthetic oligonucleotide
cctgccaggagccctcagc

SEQ ID NO: 8069 - DNA, 19 bp, Artificial Sequence
  Description of Artificial Sequence: Synthetic oligonucleotide
acctgccaggagccctcag

SEQ ID NO: 8070 - DNA, 19 bp, Artificial Sequence
  Description of Artificial Sequence: Synthetic oligonucleotide
cacctgccaggagccctca

SEQ ID NO: 8071 - DNA, 19 bp, Artificial Sequence
  Description of Artificial Sequence: Synthetic oligonucleotide
ccacctgccaggagccctc

SEQ ID NO: 8072 - DNA, 19 bp, Artificial Sequence
  Description of Artificial Sequence: Synthetic oligonucleotide
cccacctgccaggagccct

SEQ ID NO: 8073 - DNA, 19 bp, Artificial Sequence
  Description of Artificial Sequence: Synthetic oligonucleotide
acccacctgccaggagccc

SEQ ID NO: 8074 - DNA, 19 bp, Artificial Sequence
  Description of Artificial Sequence: Synthetic oligonucleotide
tacccacctgccaggagcc

SEQ ID NO: 8075 - DNA, 19 bp, Artificial Sequence
  Description of Artificial Sequence: Synthetic oligonucleotide
atacccacctgccaggagc

SEQ ID NO: 8076 - DNA, 19 bp, Artificial Sequence
  Description of Artificial Sequence: Synthetic oligonucleotide
gatacccacctgccaggag

SEQ ID NO: 8077 - DNA, 19 bp, Artificial Sequence
  Description of Artificial Sequence: Synthetic oligonucleotide
ggatacccacctgccagga

SEQ ID NO: 8078 - DNA, 19 bp, Artificial Sequence
  Description of Artificial Sequence: Synthetic oligonucleotide
tggatacccacctgccagg

SEQ ID NO: 8079 - DNA, 19 bp, Artificial Sequence
  Description of Artificial Sequence: Synthetic oligonucleotide
ttggatacccacctgccag

SEQ ID NO: 8080 - DNA, 19 bp, Artificial Sequence
  Description of Artificial Sequence: Synthetic oligonucleotide
gttggatacccacctgcca

SEQ ID NO: 8081 - DNA, 19 bp, Artificial Sequence
  Description of Artificial Sequence: Synthetic oligonucleotide
tgttggatacccacctgcc

SEQ ID NO: 8082 - DNA, 19 bp, Artificial Sequence
  Description of Artificial Sequence: Synthetic oligonucleotide
ctgttggatacccacctgc

SEQ ID NO: 8083 - DNA, 19 bp, Artificial Sequence
  Description of Artificial Sequence: Synthetic oligonucleotide
cctgttggatacccacctg

SEQ ID NO: 8084 - DNA, 19 bp, Artificial Sequence
  Description of Artificial Sequence: Synthetic oligonucleotide
tcctgttggatacccacct

SEQ ID NO: 8085 - DNA, 19 bp, Artificial Sequence
  Description of Artificial Sequence: Synthetic oligonucleotide
atcctgttggatacccacc

SEQ ID NO: 8086 - DNA, 19 bp, Artificial Sequence
  Description of Artificial Sequence: Synthetic oligonucleotide
catcctgttggatacccac

SEQ ID NO: 8087 - DNA, 19 bp, Artificial Sequence
  Description of Artificial Sequence: Synthetic oligonucleotide
acatcctgttggataccca

SEQ ID NO: 8088 - DNA, 19 bp, Artificial Sequence
  Description of Artificial Sequence: Synthetic oligonucleotide
cacatcctgttggataccc

SEQ ID NO: 8089 - DNA, 19 bp, Artificial Sequence
  Description of Artificial Sequence: Synthetic oligonucleotide
tcacatcctgttggatacc

SEQ ID NO: 8090 - DNA, 19 bp, Artificial Sequence
  Description of Artificial Sequence: Synthetic oligonucleotide
gtcacatcctgttggatac

SEQ ID NO: 8091 - DNA, 19 bp, Artificial Sequence
  Description of Artificial Sequence: Synthetic oligonucleotide
tgtcacatcctgttggata

SEQ ID NO: 8092 - DNA, 19 bp, Artificial Sequence
  Description of Artificial Sequence: Synthetic oligonucleotide
gtgtcacatcctgttggat

SEQ ID NO: 8093 - DNA, 19 bp, Artificial Sequence
  Description of Artificial Sequence: Synthetic oligonucleotide
tgtgtcacatcctgttgga

SEQ ID NO: 8094 - DNA, 19 bp, Artificial Sequence
  Description of Artificial Sequence: Synthetic oligonucleotide
atgtgtcacatcctgttgg

SEQ ID NO: 8095 - DNA, 19 bp, Artificial Sequence
  Description of Artificial Sequence: Synthetic oligonucleotide
tatgtgtcacatcctgttg

SEQ ID NO: 8096 - DNA, 19 bp, Artificial Sequence
  Description of Artificial Sequence: Synthetic oligonucleotide
gtatgtgtcacatcctgtt

SEQ ID NO: 8097 - DNA, 19 bp, Artificial Sequence
  Description of Artificial Sequence: Synthetic oligonucleotide
ggtatgtgtcacatcctgt

SEQ ID NO: 8098 - DNA, 19 bp, Artificial Sequence
  Description of Artificial Sequence: Synthetic oligonucleotide
tggtatgtgtcacatcctg

SEQ ID NO: 8099 - DNA, 19 bp, Artificial Sequence
  Description of Artificial Sequence: Synthetic oligonucleotide
ttggtatgtgtcacatcct

SEQ ID NO: 8100 - DNA, 19 bp, Artificial Sequence
  Description of Artificial Sequence: Synthetic oligonucleotide
attggtatgtgtcacatcc

SEQ ID NO: 8101 - DNA, 19 bp, Artificial Sequence
  Description of Artificial Sequence: Synthetic oligonucleotide
cattggtatgtgtcacatc

SEQ ID NO: 8102 - DNA, 19 bp, Artificial Sequence
  Description of Artificial Sequence: Synthetic oligonucleotide
ccattggtatgtgtcacat

SEQ ID NO: 8103 - DNA, 19 bp, Artificial Sequence
  Description of Artificial Sequence: Synthetic oligonucleotide
gccattggtatgtgtcaca

SEQ ID NO: 8104 - DNA, 19 bp, Artificial Sequence
  Description of Artificial Sequence: Synthetic oligonucleotide
agccattggtatgtgtcac

SEQ ID NO: 8105 - DNA, 19 bp, Artificial Sequence
  Description of Artificial Sequence: Synthetic oligonucleotide
cagccattggtatgtgtca

SEQ ID NO: 8106 - DNA, 19 bp, Artificial Sequence
  Description of Artificial Sequence: Synthetic oligonucleotide
gcagccattggtatgtgtc

SEQ ID NO: 8107 - DNA, 19 bp, Artificial Sequence
  Description of Artificial Sequence: Synthetic oligonucleotide
cgcagccattggtatgtgt

SEQ ID NO: 8108 - DNA, 19 bp, Artificial Sequence
  Description of Artificial Sequence: Synthetic oligonucleotide
acgcagccattggtatgtg

SEQ ID NO: 8109 - DNA, 19 bp, Artificial Sequence
  Description of Artificial Sequence: Synthetic oligonucleotide
cacgcagccattggtatgt

SEQ ID NO: 8110 - DNA, 19 bp, Artificial Sequence
  Description of Artificial Sequence: Synthetic oligonucleotide
ccacgcagccattggtatg

SEQ ID NO: 8111 - DNA, 19 bp, Artificial Sequence
  Description of Artificial Sequence: Synthetic oligonucleotide
gccacgcagccattggtat

SEQ ID NO: 8112 - DNA, 19 bp, Artificial Sequence
  Description of Artificial Sequence: Synthetic oligonucleotide
agccacgcagccattggta

SEQ ID NO: 8113 - DNA, 19 bp, Artificial Sequence
  Description of Artificial Sequence: Synthetic oligonucleotide
gagccacgcagccattggt

SEQ ID NO: 8114 - DNA, 19 bp, Artificial Sequence
  Description of Artificial Sequence: Synthetic oligonucleotide
agagccacgcagccattgg

SEQ ID NO: 8115 - DNA, 19 bp, Artificial Sequence
  Description of Artificial Sequence: Synthetic oligonucleotide
cagagccacgcagccattg

SEQ ID NO: 8116 - DNA, 19 bp, Artificial Sequence
  Description of Artificial Sequence: Synthetic oligonucleotide
ccagagccacgcagccatt

SEQ ID NO: 8117 - DNA, 19 bp, Artificial Sequence
  Description of Artificial Sequence: Synthetic oligonucleotide
cccagagccacgcagccat

SEQ ID NO: 8118 - DNA, 19 bp, Artificial Sequence
  Description of Artificial Sequence: Synthetic oligonucleotide
gcccagagccacgcagcca

SEQ ID NO: 8119 - DNA, 19 bp, Artificial Sequence
  Description of Artificial Sequence: Synthetic oligonucleotide
tgcccagagccacgcagcc

SEQ ID NO: 8120 - DNA, 19 bp, Artificial Sequence
  Description of Artificial Sequence: Synthetic oligonucleotide
atgcccagagccacgcagc

SEQ ID NO: 8121 - DNA, 19 bp, Artificial Sequence
  Description of Artificial Sequence: Synthetic oligonucleotide
gatgcccagagccacgcag

SEQ ID NO: 8122 - DNA, 19 bp, Artificial Sequence
  Description of Artificial Sequence: Synthetic oligonucleotide
tgatgcccagagccacgca

SEQ ID NO: 8123 - DNA, 19 bp, Artificial Sequence
  Description of Artificial Sequence: Synthetic oligonucleotide
ttgatgcccagagccacgc

SEQ ID NO: 8124 - DNA, 19 bp, Artificial Sequence
  Description of Artificial Sequence: Synthetic oligonucleotide
tttgatgcccagagccacg

SEQ ID NO: 8125 - DNA, 19 bp, Artificial Sequence
  Description of Artificial Sequence: Synthetic oligonucleotide
gtttgatgcccagagccac

SEQ ID NO: 8126 - DNA, 19 bp, Artificial Sequence
  Description of Artificial Sequence: Synthetic oligonucleotide
agtttgatgcccagagcca

SEQ ID NO: 8127 - DNA, 19 bp, Artificial Sequence
  Description of Artificial Sequence: Synthetic oligonucleotide
tagtttgatgcccagagcc

SEQ ID NO: 8128 - DNA, 19 bp, Artificial Sequence
  Description of Artificial Sequence: Synthetic oligonucleotide
gtagtttgatgcccagagc

SEQ ID NO: 8129 - DNA, 19 bp, Artificial Sequence
  Description of Artificial Sequence: Synthetic oligonucleotide
ggtagtttgatgcccagag

SEQ ID NO: 8130 - DNA, 19 bp, Artificial Sequence
  Description of Artificial Sequence: Synthetic oligonucleotide
aggtagtttgatgcccaga

SEQ ID NO: 8131 - DNA, 19 bp, Artificial Sequence
  Description of Artificial Sequence: Synthetic oligonucleotide
gaggtagtttgatgcccag

SEQ ID NO: 8132 - DNA, 19 bp, Artificial Sequence
  Description of Artificial Sequence: Synthetic oligonucleotide
tgaggtagtttgatgccca

SEQ ID NO: 8133 - DNA, 19 bp, Artificial Sequence
  Description of Artificial Sequence: Synthetic oligonucleotide
gtgaggtagtttgatgccc

SEQ ID NO: 8134 - DNA, 19 bp, Artificial Sequence
  Description of Artificial Sequence: Synthetic oligonucleotide
tgtgaggtagtttgatgcc

SEQ ID NO: 8135 - DNA, 19 bp, Artificial Sequence
  Description of Artificial Sequence: Synthetic oligonucleotide
gtgtgaggtagtttgatgc

SEQ ID NO: 8136 - DNA, 19 bp, Artificial Sequence
  Description of Artificial Sequence: Synthetic oligonucleotide
tgtgtgaggtagtttgatg

SEQ ID NO: 8137 - DNA, 19 bp, Artificial Sequence
  Description of Artificial Sequence: Synthetic oligonucleotide
ctgtgtgaggtagtttgat

SEQ ID NO: 8138 - DNA, 19 bp, Artificial Sequence
  Description of Artificial Sequence: Synthetic oligonucleotide
tctgtgtgaggtagtttga

SEQ ID NO: 8139 - DNA, 19 bp, Artificial Sequence
  Description of Artificial Sequence: Synthetic oligonucleotide
ttctgtgtgaggtagtttg

SEQ ID NO: 8140 - DNA, 19 bp, Artificial Sequence
  Description of Artificial Sequence: Synthetic oligonucleotide
attctgtgtgaggtagttt

SEQ ID NO: 8141 - DNA, 19 bp, Artificial Sequence
  Description of Artificial Sequence: Synthetic oligonucleotide
tattctgtgtgaggtagtt

SEQ ID NO: 8142 - DNA, 19 bp, Artificial Sequence
  Description of Artificial Sequence: Synthetic oligonucleotide
atattctgtgtgaggtagt

SEQ ID NO: 8143 - DNA, 19 bp, Artificial Sequence
  Description of Artificial Sequence: Synthetic oligonucleotide
catattctgtgtgaggtag

SEQ ID NO: 8144 - DNA, 19 bp, Artificial Sequence
  Description of Artificial Sequence: Synthetic oligonucleotide
tcatattctgtgtgaggta

SEQ ID NO: 8145 - DNA, 19 bp, Artificial Sequence
  Description of Artificial Sequence: Synthetic oligonucleotide
ctcatattctgtgtgaggt

SEQ ID NO: 8146 - DNA, 19 bp, Artificial Sequence
  Description of Artificial Sequence: Synthetic oligonucleotide
tctcatattctgtgtgagg

SEQ ID NO: 8147 - DNA, 19 bp, Artificial Sequence
  Description of Artificial Sequence: Synthetic oligonucleotide
atctcatattctgtgtgag

SEQ ID NO: 8148 - DNA, 19 bp, Artificial Sequence
  Description of Artificial Sequence: Synthetic oligonucleotide
gatctcatattctgtgtga

SEQ ID NO: 8149 - DNA, 19 bp, Artificial Sequence
  Description of Artificial Sequence: Synthetic oligonucleotide
agatctcatattctgtgtg

SEQ ID NO: 8150 - DNA, 19 bp, Artificial Sequence
  Description of Artificial Sequence: Synthetic oligonucleotide
aagatctcatattctgtgt

SEQ ID NO: 8151 - DNA, 19 bp, Artificial Sequence
  Description of Artificial Sequence: Synthetic oligonucleotide
gaagatctcatattctgtg

SEQ ID NO: 8152 - DNA, 19 bp, Artificial Sequence
  Description of Artificial Sequence: Synthetic oligonucleotide
tgaagatctcatattctgt

SEQ ID NO: 8153 - DNA, 19 bp, Artificial Sequence
  Description of Artificial Sequence: Synthetic oligonucleotide
ttgaagatctcatattctg

SEQ ID NO: 8154 - DNA, 19 bp, Artificial Sequence
  Description of Artificial Sequence: Synthetic oligonucleotide
tttgaagatctcatattct

SEQ ID NO: 8155 - DNA, 19 bp, Artificial Sequence
  Description of Artificial Sequence: Synthetic oligonucleotide
ttttgaagatctcatattc

SEQ ID NO: 8156 - DNA, 19 bp, Artificial Sequence
  Description of Artificial Sequence: Synthetic oligonucleotide
attttgaagatctcatatt

SEQ ID NO: 8157 - DNA, 19 bp, Artificial Sequence
  Description of Artificial Sequence: Synthetic oligonucleotide
cattttgaagatctcatat

SEQ ID NO: 8158 - DNA, 19 bp, Artificial Sequence
  Description of Artificial Sequence: Synthetic oligonucleotide
ccattttgaagatctcata

SEQ ID NO: 8159 - DNA, 19 bp, Artificial Sequence
  Description of Artificial Sequence: Synthetic oligonucleotide
tccattttgaagatctcat

SEQ ID NO: 8160 - DNA, 19 bp, Artificial Sequence
  Description of Artificial Sequence: Synthetic oligonucleotide
ctccattttgaagatctca

SEQ ID NO: 8161 - DNA, 19 bp, Artificial Sequence
  Description of Artificial Sequence: Synthetic oligonucleotide
gctccattttgaagatctc

SEQ ID NO: 8162 - DNA, 19 bp, Artificial Sequence
  Description of Artificial Sequence: Synthetic oligonucleotide
tgctccattttgaagatct

SEQ ID NO: 8163 - DNA, 19 bp, Artificial Sequence
  Description of Artificial Sequence: Synthetic oligonucleotide
ttgctccattttgaagatc

SEQ ID NO: 8164 - DNA, 19 bp, Artificial Sequence
  Description of Artificial Sequence: Synthetic oligonucleotide
cttgctccattttgaagat

SEQ ID NO: 8165 - DNA, 19 bp, Artificial Sequence
  Description of Artificial Sequence: Synthetic oligonucleotide
tcttgctccattttgaaga

SEQ ID NO: 8166 - DNA, 19 bp, Artificial Sequence
  Description of Artificial Sequence: Synthetic oligonucleotide
gtcttgctccattttgaag

SEQ ID NO: 8167 - DNA, 19 bp, Artificial Sequence
  Description of Artificial Sequence: Synthetic oligonucleotide
tgtcttgctccattttgaa

SEQ ID NO: 8168 - DNA, 19 bp, Artificial Sequence
  Description of Artificial Sequence: Synthetic oligonucleotide
gtgtcttgctccattttga

SEQ ID NO: 8169 - DNA, 19 bp, Artificial Sequence
  Description of Artificial Sequence: Synthetic oligonucleotide
ggtgtcttgctccattttg

SEQ ID NO: 8170 - DNA, 19 bp, Artificial Sequence
  Description of Artificial Sequence: Synthetic oligonucleotide
gggtgtcttgctccatttt

SEQ ID NO: 8171 - DNA, 19 bp, Artificial Sequence
  Description of Artificial Sequence: Synthetic oligonucleotide
cgggtgtcttgctccattt

SEQ ID NO: 8172 - DNA, 19 bp, Artificial Sequence
  Description of Artificial Sequence: Synthetic oligonucleotide
tcgggtgtcttgctccatt

SEQ ID NO: 8173 - DNA, 19 bp, Artificial Sequence
  Description of Artificial Sequence: Synthetic oligonucleotide
ctcgggtgtcttgctccat

SEQ ID NO: 8174 - DNA, 19 bp, Artificial Sequence
  Description of Artificial Sequence: Synthetic oligonucleotide
cctcgggtgtcttgctcca

SEQ ID NO: 8175 - DNA, 19 bp, Artificial Sequence
  Description of Artificial Sequence: Synthetic oligonucleotide
gcctcgggtgtcttgctcc

SEQ ID NO: 8176 - DNA, 19 bp, Artificial Sequence
  Description of Artificial Sequence: Synthetic oligonucleotide
ggcctcgggtgtcttgctc

SEQ ID NO: 8177 - DNA, 19 bp, Artificial Sequence
  Description of Artificial Sequence: Synthetic oligonucleotide
cggcctcgggtgtcttgct

SEQ ID NO: 8178 - DNA, 19 bp, Artificial Sequence
  Description of Artificial Sequence: Synthetic oligonucleotide
gcggcctcgggtgtcttgc

SEQ ID NO: 8179 - DNA, 19 bp, Artificial Sequence
  Description of Artificial Sequence: Synthetic oligonucleotide
agcggcctcgggtgtcttg

SEQ ID NO: 8180 - DNA, 19 bp, Artificial Sequence
  Description of Artificial Sequence: Synthetic oligonucleotide
tagcggcctcgggtgtctt

SEQ ID NO: 8181 - DNA, 19 bp, Artificial Sequence
  Description of Artificial Sequence: Synthetic oligonucleotide
gtagcggcctcgggtgtct

SEQ ID NO: 8182 - DNA, 19 bp, Artificial Sequence
  Description of Artificial Sequence: Synthetic oligonucleotide
ggtagcggcctcgggtgtc

SEQ ID NO: 8183 - DNA, 19 bp, Artificial Sequence
  Description of Artificial Sequence: Synthetic oligonucleotide
aggtagcggcctcgggtgt

SEQ ID NO: 8184 - DNA, 19 bp, Artificial Sequence
  Description of Artificial Sequence: Synthetic oligonucleotide
caggtagcggcctcgggtg

SEQ ID NO: 8185 - DNA, 19 bp, Artificial Sequence
  Description of Artificial Sequence: Synthetic oligonucleotide
gcaggtagcggcctcgggt

SEQ ID NO: 8186 - DNA, 19 bp, Artificial Sequence
  Description of Artificial Sequence: Synthetic oligonucleotide
agcaggtagcggcctcggg

SEQ ID NO: 8187 - DNA, 19 bp, Artificial Sequence
  Description of Artificial Sequence: Synthetic oligonucleotide
cagcaggtagcggcctcgg

SEQ ID NO: 8188 - DNA, 19 bp, Artificial Sequence
  Description of Artificial Sequence: Synthetic oligonucleotide
acagcaggtagcggcctcg

SEQ ID NO: 8189 - DNA, 19 bp, Artificial Sequence
  Description of Artificial Sequence: Synthetic oligonucleotide
aacagcaggtagcggcctc

SEQ ID NO: 8190 - DNA, 19 bp, Artificial Sequence
  Description of Artificial Sequence: Synthetic oligonucleotide
gaacagcaggtagcggcct

SEQ ID NO: 8191 - DNA, 19 bp, Artificial Sequence
  Description of Artificial Sequence: Synthetic oligonucleotide
tgaacagcaggtagcggcc

SEQ ID NO: 8192 - DNA, 19 bp, Artificial Sequence
  Description of Artificial Sequence: Synthetic oligonucleotide
ttgaacagcaggtagcggc

SEQ ID NO: 8193 - DNA, 19 bp, Artificial Sequence
  Description of Artificial Sequence: Synthetic oligonucleotide
attgaacagcaggtagcgg

SEQ ID NO: 8194 - DNA, 19 bp, Artificial Sequence
  Description of Artificial Sequence: Synthetic oligonucleotide
cattgaacagcaggtagcg

SEQ ID NO: 8195 - DNA, 19 bp, Artificial Sequence
  Description of Artificial Sequence: Synthetic oligonucleotide
ccattgaacagcaggtagc

SEQ ID NO: 8196 - DNA, 19 bp, Artificial Sequence
  Description of Artificial Sequence: Synthetic oligonucleotide
gccattgaacagcaggtag

SEQ ID NO: 8197 - DNA, 19 bp, Artificial Sequence
  Description of Artificial Sequence: Synthetic oligonucleotide
ggccattgaacagcaggta

SEQ ID NO: 8198 - DNA, 19 bp, Artificial Sequence
  Description of Artificial Sequence: Synthetic oligonucleotide
tggccattgaacagcaggt

SEQ ID NO: 8199 - DNA, 19 bp, Artificial Sequence
  Description of Artificial Sequence: Synthetic oligonucleotide
ctggccattgaacagcagg

SEQ ID NO: 8200 - DNA, 19 bp, Artificial Sequence
  Description of Artificial Sequence: Synthetic oligonucleotide
tctggccattgaacagcag

SEQ ID NO: 8201 - DNA, 19 bp, Artificial Sequence
  Description of Artificial Sequence: Synthetic oligonucleotide
ctctggccattgaacagca

SEQ ID NO: 8202 - DNA, 19 bp, Artificial Sequence
  Description of Artificial Sequence: Synthetic oligonucleotide
cctctggccattgaacagc

SEQ ID NO: 8203 - DNA, 19 bp, Artificial Sequence
  Description of Artificial Sequence: Synthetic oligonucleotide
gcctctggccattgaacag

SEQ ID NO: 8204 - DNA, 19 bp, Artificial Sequence
  Description of Artificial Sequence: Synthetic oligonucleotide
ggcctctggccattgaaca

SEQ ID NO: 8205 - DNA, 19 bp, Artificial Sequence
  Description of Artificial Sequence: Synthetic oligonucleotide
gggcctctggccattgaac

SEQ ID NO: 8206 - DNA, 19 bp, Artificial Sequence
  Description of Artificial Sequence: Synthetic oligonucleotide
tgggcctctggccattgaa

SEQ ID NO: 8207 - DNA, 19 bp, Artificial Sequence
  Description of Artificial Sequence: Synthetic oligonucleotide
ctgggcctctggccattga

SEQ ID NO: 8208 - DNA, 19 bp, Artificial Sequence
  Description of Artificial Sequence: Synthetic oligonucleotide
gctgggcctctggccattg

SEQ ID NO: 8209 - DNA, 19 bp, Artificial Sequence
  Description of Artificial Sequence: Synthetic oligonucleotide
cgctgggcctctggccatt

SEQ ID NO: 8210 - DNA, 19 bp, Artificial Sequence
  Description of Artificial Sequence: Synthetic oligonucleotide
tcgctgggcctctggccat

SEQ ID NO: 8211 - DNA, 19 bp, Artificial Sequence
  Description of Artificial Sequence: Synthetic oligonucleotide
atcgctgggcctctggcca

SEQ ID NO: 8212 - DNA, 19 bp, Artificial Sequence
  Description of Artificial Sequence: Synthetic oligonucleotide
catcgctgggcctctggcc

SEQ ID NO: 8213 - DNA, 19 bp, Artificial Sequence
  Description of Artificial Sequence: Synthetic oligonucleotide
ccatcgctgggcctctggc

SEQ ID NO: 8214 - DNA, 19 bp, Artificial Sequence
  Description of Artificial Sequence: Synthetic oligonucleotide
gccatcgctgggcctctgg

SEQ ID NO: 8215 - DNA, 19 bp, Artificial Sequence
  Description of Artificial Sequence: Synthetic oligonucleotide
agccatcgctgggcctctg

SEQ ID NO: 8216 - DNA, 19 bp, Artificial Sequence
  Description of Artificial Sequence: Synthetic oligonucleotide
gagccatcgctgggcctct

SEQ ID NO: 8217 - DNA, 19 bp, Artificial Sequence
  Description of Artificial Sequence: Synthetic oligonucleotide
ggagccatcgctgggcctc

SEQ ID NO: 8218 - DNA, 19 bp, Artificial Sequence
  Description of Artificial Sequence: Synthetic oligonucleotide
tggagccatcgctgggcct

SEQ ID NO: 8219 - DNA, 19 bp, Artificial Sequence
  Description of Artificial Sequence: Synthetic oligonucleotide
ctggagccatcgctgggcc

SEQ ID NO: 8220 - DNA, 19 bp, Artificial Sequence
  Description of Artificial Sequence: Synthetic oligonucleotide
gctggagccatcgctgggc

SEQ ID NO: 8221 - DNA, 19 bp, Artificial Sequence
  Description of Artificial Sequence: Synthetic oligonucleotide
ggctggagccatcgctggg

SEQ ID NO: 8222 - DNA, 19 bp, Artificial Sequence
  Description of Artificial Sequence: Synthetic oligonucleotide
gggctggagccatcgctgg

SEQ ID NO: 8223 - DNA, 19 bp, Artificial Sequence
  Description of Artificial Sequence: Synthetic oligonucleotide
tgggctggagccatcgctg

SEQ ID NO: 8224 - DNA, 19 bp, Artificial Sequence
  Description of Artificial Sequence: Synthetic oligonucleotide
ctgggctggagccatcgct

SEQ ID NO: 8225 - DNA, 19 bp, Artificial Sequence
  Description of Artificial Sequence: Synthetic oligonucleotide
tctgggctggagccatcgc

SEQ ID NO: 8226 - DNA, 19 bp, Artificial Sequence
  Description of Artificial Sequence: Synthetic oligonucleotide
gtctgggctggagccatcg

SEQ ID NO: 8227 - DNA, 19 bp, Artificial Sequence
  Description of Artificial Sequence: Synthetic oligonucleotide
tgtctgggctggagccatc

SEQ ID NO: 8228 - DNA, 19 bp, Artificial Sequence
  Description of Artificial Sequence: Synthetic oligonucleotide
ctgtctgggctggagccat

SEQ ID NO: 8229 - DNA, 19 bp, Artificial Sequence
  Description of Artificial Sequence: Synthetic oligonucleotide
tctgtctgggctggagcca

SEQ ID NO: 8230 - DNA, 19 bp, Artificial Sequence
  Description of Artificial Sequence: Synthetic oligonucleotide
gtctgtctgggctggagcc

SEQ ID NO: 8231 - DNA, 19 bp, Artificial Sequence
  Description of Artificial Sequence: Synthetic oligonucleotide
ggtctgtctgggctggagc

SEQ ID NO: 8232 - DNA, 19 bp, Artificial Sequence
  Description of Artificial Sequence: Synthetic oligonucleotide
tggtctgtctgggctggag

SEQ ID NO: 8233 - DNA, 19 bp, Artificial Sequence
  Description of Artificial Sequence: Synthetic oligonucleotide
ctggtctgtctgggctgga

SEQ ID NO: 8234 - DNA, 19 bp, Artificial Sequence
  Description of Artificial Sequence: Synthetic oligonucleotide
tctggtctgtctgggctgg

SEQ ID NO: 8235 - DNA, 19 bp, Artificial Sequence
  Description of Artificial Sequence: Synthetic oligonucleotide
ctctggtctgtctgggctg

SEQ ID NO: 8236 - DNA, 19 bp, Artificial Sequence
  Description of Artificial Sequence: Synthetic oligonucleotide
tctctggtctgtctgggct

SEQ ID NO: 8237 - DNA, 19 bp, Artificial Sequence
  Description of Artificial Sequence: Synthetic oligonucleotide
ttctctggtctgtctgggc

SEQ ID NO: 8238 - DNA, 19 bp, Artificial Sequence
  Description of Artificial Sequence: Synthetic oligonucleotide
cttctctggtctgtctggg

SEQ ID NO: 8239 - DNA, 19 bp, Artificial Sequence
  Description of Artificial Sequence: Synthetic oligonucleotide
tcttctctggtctgtctgg

SEQ ID NO: 8240 - DNA, 19 bp, Artificial Sequence
  Description of Artificial Sequence: Synthetic oligonucleotide
ctcttctctggtctgtctg

SEQ ID NO: 8241 - DNA, 19 bp, Artificial Sequence
  Description of Artificial Sequence: Synthetic oligonucleotide
tctcttctctggtctgtct

SEQ ID NO: 8242 - DNA, 19 bp, Artificial Sequence
  Description of Artificial Sequence: Synthetic oligonucleotide
ctctcttctctggtctgtc

SEQ ID NO: 8243 - DNA, 19 bp, Artificial Sequence
  Description of Artificial Sequence: Synthetic oligonucleotide
gctctcttctctggtctgt

SEQ ID NO: 8244 - DNA, 19 bp, Artificial Sequence
  Description of Artificial Sequence: Synthetic oligonucleotide
ggctctcttctctggtctg

SEQ ID NO: 8245 - DNA, 19 bp, Artificial Sequence
  Description of Artificial Sequence: Synthetic oligonucleotide
tggctctcttctctggtct

SEQ ID NO: 8246 - DNA, 19 bp, Artificial Sequence
  Description of Artificial Sequence: Synthetic oligonucleotide
gtggctctcttctctggtc

SEQ ID NO: 8247 - DNA, 19 bp, Artificial Sequence
  Description of Artificial Sequence: Synthetic oligonucleotide
tgtggctctcttctctggt

SEQ ID NO: 8248 - DNA, 19 bp, Artificial Sequence
  Description of Artificial Sequence: Synthetic oligonucleotide
atgtggctctcttctctgg

SEQ ID NO: 8249 - DNA, 19 bp, Artificial Sequence
  Description of Artificial Sequence: Synthetic oligonucleotide
gatgtggctctcttctctg

SEQ ID NO: 8250 - DNA, 19 bp, Artificial Sequence
  Description of Artificial Sequence: Synthetic oligonucleotide
ggatgtggctctcttctct

SEQ ID NO: 8251 - DNA, 19 bp, Artificial Sequence
  Description of Artificial Sequence: Synthetic oligonucleotide
aggatgtggctctcttctc

SEQ ID NO: 8252 - DNA, 19 bp, Artificial Sequence
  Description of Artificial Sequence: Synthetic oligonucleotide
taggatgtggctctcttct

SEQ ID NO: 8253 - DNA, 19 bp, Artificial Sequence
  Description of Artificial Sequence: Synthetic oligonucleotide
gtaggatgtggctctcttc

SEQ ID NO: 8254 - DNA, 19 bp, Artificial Sequence
  Description of Artificial Sequence: Synthetic oligonucleotide
ggtaggatgtggctctctt

SEQ ID NO: 8255 - DNA, 19 bp, Artificial Sequence
  Description of Artificial Sequence: Synthetic oligonucleotide
tggtaggatgtggctctct

SEQ ID NO: 8256 - DNA, 19 bp, Artificial Sequence
  Description of Artificial Sequence: Synthetic oligonucleotide
ctggtaggatgtggctctc

SEQ ID NO: 8257 - DNA, 19 bp, Artificial Sequence
  Description of Artificial Sequence: Synthetic oligonucleotide
tctggtaggatgtggctct

SEQ ID NO: 8258 - DNA, 19 bp, Artificial Sequence
  Description of Artificial Sequence: Synthetic oligonucleotide
atctggtaggatgtggctc

SEQ ID NO: 8259 - DNA, 19 bp, Artificial Sequence
  Description of Artificial Sequence: Synthetic oligonucleotide
catctggtaggatgtggct

SEQ ID NO: 8260 - DNA, 19 bp, Artificial Sequence
  Description of Artificial Sequence: Synthetic oligonucleotide
gcatctggtaggatgtggc

SEQ ID NO: 8261 - DNA, 19 bp, Artificial Sequence
  Description of Artificial Sequence: Synthetic oligonucleotide
ggcatctggtaggatgtgg

SEQ ID NO: 8262 - DNA, 19 bp, Artificial Sequence
  Description of Artificial Sequence: Synthetic oligonucleotide
gggcatctggtaggatgtg

SEQ ID NO: 8263 - DNA, 19 bp, Artificial Sequence
  Description of Artificial Sequence: Synthetic oligonucleotide
agggcatctggtaggatgt

SEQ ID NO: 8264 - DNA, 19 bp, Artificial Sequence
  Description of Artificial Sequence: Synthetic oligonucleotide
aagggcatctggtaggatg

SEQ ID NO: 8265 - DNA, 19 bp, Artificial Sequence
  Description of Artificial Sequence: Synthetic oligonucleotide
caagggcatctggtaggat

SEQ ID NO: 8266 - DNA, 19 bp, Artificial Sequence
  Description of Artificial Sequence: Synthetic oligonucleotide
ccaagggcatctggtagga

SEQ ID NO: 8267 - DNA, 19 bp, Artificial Sequence
  Description of Artificial Sequence: Synthetic oligonucleotide
accaagggcatctggtagg

SEQ ID NO: 8268 - DNA, 19 bp, Artificial Sequence
  Description of Artificial Sequence: Synthetic oligonucleotide
gaccaagggcatctggtag

SEQ ID NO: 8269 - DNA, 19 bp, Artificial Sequence
  Description of Artificial Sequence: Synthetic oligonucleotide
ggaccaagggcatctggta

SEQ ID NO: 8270 - DNA, 19 bp, Artificial Sequence
  Description of Artificial Sequence: Synthetic oligonucleotide
tggaccaagggcatctggt

SEQ ID NO: 8271 - DNA, 19 bp, Artificial Sequence
  Description of Artificial Sequence: Synthetic oligonucleotide
ctggaccaagggcatctgg

SEQ ID NO: 8272 - DNA, 19 bp, Artificial Sequence
  Description of Artificial Sequence: Synthetic oligonucleotide
actggaccaagggcatctg

SEQ ID NO: 8273 - DNA, 19 bp, Artificial Sequence
  Description of Artificial Sequence: Synthetic oligonucleotide
cactggaccaagggcatct

SEQ ID NO: 8274 - DNA, 19 bp, Artificial Sequence
  Description of Artificial Sequence: Synthetic oligonucleotide
acactggaccaagggcatc

SEQ ID NO: 8275 - DNA, 19 bp, Artificial Sequence
  Description of Artificial Sequence: Synthetic oligonucleotide
cacactggaccaagggcat

SEQ ID NO: 8276 - DNA, 19 bp, Artificial Sequence
  Description of Artificial Sequence: Synthetic oligonucleotide
gcacactggaccaagggca

SEQ ID NO: 8277 - DNA, 19 bp, Artificial Sequence
  Description of Artificial Sequence: Synthetic oligonucleotide
ggcacactggaccaagggc

SEQ ID NO: 8278 - DNA, 19 bp, Artificial Sequence
  Description of Artificial Sequence: Synthetic oligonucleotide
aggcacactggaccaaggg

SEQ ID NO: 8279 - DNA, 19 bp, Artificial Sequence
  Description of Artificial Sequence: Synthetic oligonucleotide
gaggcacactggaccaagg

SEQ ID NO: 8280 - DNA, 19 bp, Artificial Sequence
  Description of Artificial Sequence: Synthetic oligonucleotide
agaggcacactggaccaag

SEQ ID NO: 8281 - DNA, 19 bp, Artificial Sequence
  Description of Artificial Sequence: Synthetic oligonucleotide
aagaggcacactggaccaa

SEQ ID NO: 8282 - DNA, 19 bp, Artificial Sequence
  Description of Artificial Sequence: Synthetic oligonucleotide
gaagaggcacactggacca

SEQ ID NO: 8283 - DNA, 19 bp, Artificial Sequence
  Description of Artificial Sequence: Synthetic oligonucleotide
ggaagaggcacactggacc

SEQ ID NO: 8284 - DNA, 19 bp, Artificial Sequence
  Description of Artificial Sequence: Synthetic oligonucleotide
aggaagaggcacactggac

SEQ ID NO: 8285 - DNA, 19 bp, Artificial Sequence
  Description of Artificial Sequence: Synthetic oligonucleotide
gaggaagaggcacactgga

SEQ ID NO: 8286 - DNA, 19 bp, Artificial Sequence
  Description of Artificial Sequence: Synthetic oligonucleotide
tgaggaagaggcacactgg

SEQ ID NO: 8287 - DNA, 19 bp, Artificial Sequence
  Description of Artificial Sequence: Synthetic oligonucleotide
gtgaggaagaggcacactg

SEQ ID NO: 8288 - DNA, 19 bp, Artificial Sequence
  Description of Artificial Sequence: Synthetic oligonucleotide
ggtgaggaagaggcacact

SEQ ID NO: 8289 - DNA, 19 bp, Artificial Sequence
  Description of Artificial Sequence: Synthetic oligonucleotide
tggtgaggaagaggcacac

SEQ ID NO: 8290 - DNA, 19 bp, Artificial Sequence
  Description of Artificial Sequence: Synthetic oligonucleotide
ttggtgaggaagaggcaca

SEQ ID NO: 8291 - DNA, 19 bp, Artificial Sequence
  Description of Artificial Sequence: Synthetic oligonucleotide
cttggtgaggaagaggcac

SEQ ID NO: 8292 - DNA, 19 bp, Artificial Sequence
  Description of Artificial Sequence: Synthetic oligonucleotide
tcttggtgaggaagaggca

SEQ ID NO: 8293 - DNA, 19 bp, Artificial Sequence
  Description of Artificial Sequence: Synthetic oligonucleotide
ctcttggtgaggaagaggc

SEQ ID NO: 8294 - DNA, 19 bp, Artificial Sequence
  Description of Artificial Sequence: Synthetic oligonucleotide
gctcttggtgaggaagagg

SEQ ID NO: 8295 - DNA, 19 bp, Artificial Sequence
  Description of Artificial Sequence: Synthetic oligonucleotide
agctcttggtgaggaagag

SEQ ID NO: 8296 - DNA, 19 bp, Artificial Sequence
  Description of Artificial Sequence: Synthetic oligonucleotide
cagctcttggtgaggaaga

SEQ ID NO: 8297 - DNA, 19 bp, Artificial Sequence
  Description of Artificial Sequence: Synthetic oligonucleotide
tcagctcttggtgaggaag

SEQ ID NO: 8298 - DNA, 19 bp, Artificial Sequence
  Description of Artificial Sequence: Synthetic oligonucleotide
ttcagctcttggtgaggaa

SEQ ID NO: 8299 - DNA, 19 bp, Artificial Sequence
  Description of Artificial Sequence: Synthetic oligonucleotide
cttcagctcttggtgagga

SEQ ID NO: 8300 - DNA, 19 bp, Artificial Sequence
  Description of Artificial Sequence: Synthetic oligonucleotide
tcttcagctcttggtgagg

SEQ ID NO: 8301 - DNA, 19 bp, Artificial Sequence
  Description of Artificial Sequence: Synthetic oligonucleotide
ctcttcagctcttggtgag

SEQ ID NO: 8302 - DNA, 19 bp, Artificial Sequence
  Description of Artificial Sequence: Synthetic oligonucleotide
actcttcagctcttggtga

SEQ ID NO: 8303 - DNA, 19 bp, Artificial Sequence
  Description of Artificial Sequence: Synthetic oligonucleotide
aactcttcagctcttggtg

SEQ ID NO: 8304 - DNA, 19 bp, Artificial Sequence
  Description of Artificial Sequence: Synthetic oligonucleotide
caactcttcagctcttggt

SEQ ID NO: 8305 - DNA, 19 bp, Artificial Sequence
  Description of Artificial Sequence: Synthetic oligonucleotide
acaactcttcagctcttgg

SEQ ID NO: 8306 - DNA, 19 bp, Artificial Sequence
  Description of Artificial Sequence: Synthetic oligonucleotide
aacaactcttcagctcttg

SEQ ID NO: 8307 - DNA, 19 bp, Artificial Sequence
  Description of Artificial Sequence: Synthetic oligonucleotide
caacaactcttcagctctt

SEQ ID NO: 8308 - DNA, 19 bp, Artificial Sequence
  Description of Artificial Sequence: Synthetic oligonucleotide
ccaacaactcttcagctct

SEQ ID NO: 8309 - DNA, 19 bp, Artificial Sequence
  Description of Artificial Sequence: Synthetic oligonucleotide
tccaacaactcttcagctc

SEQ ID NO: 8310 - DNA, 19 bp, Artificial Sequence
  Description of Artificial Sequence: Synthetic oligonucleotide
ttccaacaactcttcagct

SEQ ID NO: 8311 - DNA, 19 bp, Artificial Sequence
  Description of Artificial Sequence: Synthetic oligonucleotide
cttccaacaactcttcagc

SEQ ID NO: 8312 - DNA, 19 bp, Artificial Sequence
  Description of Artificial Sequence: Synthetic oligonucleotide
tcttccaacaactcttcag

SEQ ID NO: 8313 - DNA, 19 bp, Artificial Sequence
  Description of Artificial Sequence: Synthetic oligonucleotide
gtcttccaacaactcttca

SEQ ID NO: 8314 - DNA, 19 bp, Artificial Sequence
  Description of Artificial Sequence: Synthetic oligonucleotide
tgtcttccaacaactcttc

SEQ ID NO: 8315 - DNA, 19 bp, Artificial Sequence
  Description of Artificial Sequence: Synthetic oligonucleotide
ctgtcttccaacaactctt

SEQ ID NO: 8316 - DNA, 19 bp, Artificial Sequence
  Description of Artificial Sequence: Synthetic oligonucleotide
actgtcttccaacaactct

SEQ ID NO: 8317 - DNA, 19 bp, Artificial Sequence
  Description of Artificial Sequence: Synthetic oligonucleotide
gactgtcttccaacaactc

SEQ ID NO: 8318 - DNA, 19 bp, Artificial Sequence
  Description of Artificial Sequence: Synthetic oligonucleotide
tgactgtcttccaacaact

SEQ ID NO: 8319 - DNA, 19 bp, Artificial Sequence
  Description of Artificial Sequence: Synthetic oligonucleotide
ttgactgtcttccaacaac

SEQ ID NO: 8320 - DNA, 19 bp, Artificial Sequence
  Description of Artificial Sequence: Synthetic oligonucleotide
cttgactgtcttccaacaa

SEQ ID NO: 8321 - DNA, 19 bp, Artificial Sequence
  Description of Artificial Sequence: Synthetic oligonucleotide
ccttgactgtcttccaaca

SEQ ID NO: 8322 - DNA, 19 bp, Artificial Sequence
  Description of Artificial Sequence: Synthetic oligonucleotide
accttgactgtcttccaac

SEQ ID NO: 8323 - DNA, 19 bp, Artificial Sequence
  Description of Artificial Sequence: Synthetic oligonucleotide
gaccttgactgtcttccaa

SEQ ID NO: 8324 - DNA, 19 bp, Artificial Sequence
  Description of Artificial Sequence: Synthetic oligonucleotide
tgaccttgactgtcttcca

SEQ ID NO: 8325 - DNA, 19 bp, Artificial Sequence
  Description of Artificial Sequence: Synthetic oligonucleotide
atgaccttgactgtcttcc

SEQ ID NO: 8326 - DNA, 19 bp, Artificial Sequence
  Description of Artificial Sequence: Synthetic oligonucleotide
gatgaccttgactgtcttc

SEQ ID NO: 8327 - DNA, 19 bp, Artificial Sequence
  Description of Artificial Sequence: Synthetic oligonucleotide
agatgaccttgactgtctt

SEQ ID NO: 8328 - DNA, 19 bp, Artificial Sequence
  Description of Artificial Sequence: Synthetic oligonucleotide
cagatgaccttgactgtct

SEQ ID NO: 8329 - DNA, 19 bp, Artificial Sequence
  Description of Artificial Sequence: Synthetic oligonucleotide
acagatgaccttgactgtc

SEQ ID NO: 8330 - DNA, 19 bp, Artificial Sequence
  Description of Artificial Sequence: Synthetic oligonucleotide
tacagatgaccttgactgt

SEQ ID NO: 8331 - DNA, 19 bp, Artificial Sequence
  Description of Artificial Sequence: Synthetic oligonucleotide
atacagatgaccttgactg

SEQ ID NO: 8332 - DNA, 19 bp, Artificial Sequence
  Description of Artificial Sequence: Synthetic oligonucleotide
catacagatgaccttgact

SEQ ID NO: 8333 - DNA, 19 bp, Artificial Sequence
  Description of Artificial Sequence: Synthetic oligonucleotide
ccatacagatgaccttgac

SEQ ID NO: 8334 - DNA, 19 bp, Artificial Sequence
  Description of Artificial Sequence: Synthetic oligonucleotide
gccatacagatgaccttga

SEQ ID NO: 8335 - DNA, 19 bp, Artificial Sequence
  Description of Artificial Sequence: Synthetic oligonucleotide
tgccatacagatgaccttg

SEQ ID NO: 8336 - DNA, 19 bp, Artificial Sequence
  Description of Artificial Sequence: Synthetic oligonucleotide
ctgccatacagatgacctt

SEQ ID NO: 8337 - DNA, 19 bp, Artificial Sequence
  Description of Artificial Sequence: Synthetic oligonucleotide
cctgccatacagatgacct

SEQ ID NO: 8338 - DNA, 19 bp, Artificial Sequence
  Description of Artificial Sequence: Synthetic oligonucleotide
ccctgccatacagatgacc

SEQ ID NO: 8339 - DNA, 19 bp, Artificial Sequence
  Description of Artificial Sequence: Synthetic oligonucleotide
gccctgccatacagatgac

SEQ ID NO: 8340 - DNA, 19 bp, Artificial Sequence
  Description of Artificial Sequence: Synthetic oligonucleotide
tgccctgccatacagatga

SEQ ID NO: 8341 - DNA, 19 bp, Artificial Sequence
  Description of Artificial Sequence: Synthetic oligonucleotide
ctgccctgccatacagatg

SEQ ID NO: 8342 - DNA, 19 bp, Artificial Sequence
  Description of Artificial Sequence: Synthetic oligonucleotide
gctgccctgccatacagat

SEQ ID NO: 8343 - DNA, 19 bp, Artificial Sequence
  Description of Artificial Sequence: Synthetic oligonucleotide
tgctgccctgccatacaga

SEQ ID NO: 8344 - DNA, 19 bp, Artificial Sequence
  Description of Artificial Sequence: Synthetic oligonucleotide
ctgctgccctgccatacag

SEQ ID NO: 8345 - DNA, 19 bp, Artificial Sequence
  Description of Artificial Sequence: Synthetic oligonucleotide
cctgctgccctgccataca

SEQ ID NO: 8346 - DNA, 19 bp, Artificial Sequence
  Description of Artificial Sequence: Synthetic oligonucleotide
ccctgctgccctgccatac

SEQ ID NO: 8347 - DNA, 19 bp, Artificial Sequence
  Description of Artificial Sequence: Synthetic oligonucleotide
tccctgctgccctgccata

SEQ ID NO: 8348 - DNA, 19 bp, Artificial Sequence
  Description of Artificial Sequence: Synthetic oligonucleotide
ctccctgctgccctgccat

SEQ ID NO: 8349 - DNA, 19 bp, Artificial Sequence
  Description of Artificial Sequence: Synthetic oligonucleotide
cctccctgctgccctgcca

SEQ ID NO: 8350 - DNA, 19 bp, Artificial Sequence
  Description of Artificial Sequence: Synthetic oligonucleotide
tcctccctgctgccctgcc

SEQ ID NO: 8351 - DNA, 19 bp, Artificial Sequence
  Description of Artificial Sequence: Synthetic oligonucleotide
gtcctccctgctgccctgc

SEQ ID NO: 8352 - DNA, 19 bp, Artificial Sequence
  Description of Artificial Sequence: Synthetic oligonucleotide
tgtcctccctgctgccctg

SEQ ID NO: 8353 - DNA, 19 bp, Artificial Sequence
  Description of Artificial Sequence: Synthetic oligonucleotide
ctgtcctccctgctgccct

SEQ ID NO: 8354 - DNA, 19 bp, Artificial Sequence
  Description of Artificial Sequence: Synthetic oligonucleotide
gctgtcctccctgctgccc

SEQ ID NO: 8355 - DNA, 19 bp, Artificial Sequence
  Description of Artificial Sequence: Synthetic oligonucleotide
agctgtcctccctgctgcc

SEQ ID NO: 8356 - DNA, 19 bp, Artificial Sequence
  Description of Artificial Sequence: Synthetic oligonucleotide
cagctgtcctccctgctgc

SEQ ID NO: 8357 - DNA, 19 bp, Artificial Sequence
  Description of Artificial Sequence: Synthetic oligonucleotide
ccagctgtcctccctgctg

SEQ ID NO: 8358 - DNA, 19 bp, Artificial Sequence
  Description of Artificial Sequence: Synthetic oligonucleotide
cccagctgtcctccctgct

SEQ ID NO: 8359 - DNA, 19 bp, Artificial Sequence
  Description of Artificial Sequence: Synthetic oligonucleotide
acccagctgtcctccctgc

SEQ ID NO: 8360 - DNA, 19 bp, Artificial Sequence
  Description of Artificial Sequence: Synthetic oligonucleotide
gacccagctgtcctccctg

SEQ ID NO: 8361 - DNA, 19 bp, Artificial Sequence
  Description of Artificial Sequence: Synthetic oligonucleotide
ggacccagctgtcctccct

SEQ ID NO: 8362 - DNA, 19 bp, Artificial Sequence
  Description of Artificial Sequence: Synthetic oligonucleotide
gggacccagctgtcctccc

SEQ ID NO: 8363 - DNA, 19 bp, Artificial Sequence
  Description of Artificial Sequence: Synthetic oligonucleotide
agggacccagctgtcctcc

SEQ ID NO: 8364 - DNA, 19 bp, Artificial Sequence
  Description of Artificial Sequence: Synthetic oligonucleotide
cagggacccagctgtcctc

SEQ ID NO: 8365 - DNA, 19 bp, Artificial Sequence
  Description of Artificial Sequence: Synthetic oligonucleotide
acagggacccagctgtcct

SEQ ID NO: 8366 - DNA, 19 bp, Artificial Sequence
  Description of Artificial Sequence: Synthetic oligonucleotide
aacagggacccagctgtcc

SEQ ID NO: 8367 - DNA, 19 bp, Artificial Sequence
  Description of Artificial Sequence: Synthetic oligonucleotide
caacagggacccagctgtc

SEQ ID NO: 8368 - DNA, 19 bp, Artificial Sequence
  Description of Artificial Sequence: Synthetic oligonucleotide
gcaacagggacccagctgt

SEQ ID NO: 8369 - DNA, 19 bp, Artificial Sequence
  Description of Artificial Sequence: Synthetic oligonucleotide
agcaacagggacccagctg

SEQ ID NO: 8370 - DNA, 19 bp, Artificial Sequence
  Description of Artificial Sequence: Synthetic oligonucleotide
aagcaacagggacccagct

SEQ ID NO: 8371 - DNA, 19 bp, Artificial Sequence
  Description of Artificial Sequence: Synthetic oligonucleotide
gaagcaacagggacccagc

SEQ ID NO: 8372 - DNA, 19 bp, Artificial Sequence
  Description of Artificial Sequence: Synthetic oligonucleotide
ggaagcaacagggacccag

SEQ ID NO: 8373 - DNA, 19 bp, Artificial Sequence
  Description of Artificial Sequence: Synthetic oligonucleotide
aggaagcaacagggaccca

SEQ ID NO: 8374 - DNA, 19 bp, Artificial Sequence
  Description of Artificial Sequence: Synthetic oligonucleotide
caggaagcaacagggaccc

SEQ ID NO: 8375 - DNA, 19 bp, Artificial Sequence
  Description of Artificial Sequence: Synthetic oligonucleotide
gcaggaagcaacagggacc

SEQ ID NO: 8376 - DNA, 19 bp, Artificial Sequence
  Description of Artificial Sequence: Synthetic oligonucleotide
ggcaggaagcaacagggac

SEQ ID NO: 8377 - DNA, 19 bp, Artificial Sequence
  Description of Artificial Sequence: Synthetic oligonucleotide
aggcaggaagcaacaggga

SEQ ID NO: 8378 - DNA, 19 bp, Artificial Sequence
  Description of Artificial Sequence: Synthetic oligonucleotide
aaggcaggaagcaacaggg

SEQ ID NO: 8379 - DNA, 19 bp, Artificial Sequence
  Description of Artificial Sequence: Synthetic oligonucleotide
aaaggcaggaagcaacagg

SEQ ID NO: 8380 - DNA, 19 bp, Artificial Sequence
  Description of Artificial Sequence: Synthetic oligonucleotide
caaaggcaggaagcaacag

SEQ ID NO: 8381 - DNA, 19 bp, Artificial Sequence
  Description of Artificial Sequence: Synthetic oligonucleotide
acaaaggcaggaagcaaca

SEQ ID NO: 8382 - DNA, 19 bp, Artificial Sequence
  Description of Artificial Sequence: Synthetic oligonucleotide
gacaaaggcaggaagcaac

SEQ ID NO: 8383 - DNA, 19 bp, Artificial Sequence
  Description of Artificial Sequence: Synthetic oligonucleotide
tgacaaaggcaggaagcaa

SEQ ID NO: 8384 - DNA, 19 bp, Artificial Sequence
  Description of Artificial Sequence: Synthetic oligonucleotide
ctgacaaaggcaggaagca

SEQ ID NO: 8385 - DNA, 19 bp, Artificial Sequence
  Description of Artificial Sequence: Synthetic oligonucleotide
gctgacaaaggcaggaagc

SEQ ID NO: 8386 - DNA, 19 bp, Artificial Sequence
  Description of Artificial Sequence: Synthetic oligonucleotide
ggctgacaaaggcaggaag

SEQ ID NO: 8387 - DNA, 19 bp, Artificial Sequence
  Description of Artificial Sequence: Synthetic oligonucleotide
aggctgacaaaggcaggaa

SEQ ID NO: 8388 - DNA, 19 bp, Artificial Sequence
  Description of Artificial Sequence: Synthetic oligonucleotide
aaggctgacaaaggcagga

SEQ ID NO: 8389 - DNA, 19 bp, Artificial Sequence
  Description of Artificial Sequence: Synthetic oligonucleotide
aaaggctgacaaaggcagg

SEQ ID NO: 8390 - DNA, 19 bp, Artificial Sequence
  Description of Artificial Sequence: Synthetic oligonucleotide
caaaggctgacaaaggcag

SEQ ID NO: 8391 - DNA, 19 bp, Artificial Sequence
  Description of Artificial Sequence: Synthetic oligonucleotide
ccaaaggctgacaaaggca

SEQ ID NO: 8392 - DNA, 19 bp, Artificial Sequence
  Description of Artificial Sequence: Synthetic oligonucleotide
tccaaaggctgacaaaggc

SEQ ID NO: 8393 - DNA, 19 bp, Artificial Sequence
  Description of Artificial Sequence: Synthetic oligonucleotide
gtccaaaggctgacaaagg

SEQ ID NO: 8394 - DNA, 19 bp, Artificial Sequence
  Description of Artificial Sequence: Synthetic oligonucleotide
agtccaaaggctgacaaag

SEQ ID NO: 8395 - DNA, 19 bp, Artificial Sequence
  Description of Artificial Sequence: Synthetic oligonucleotide
gagtccaaaggctgacaaa

SEQ ID NO: 8396 - DNA, 19 bp, Artificial Sequence
  Description of Artificial Sequence: Synthetic oligonucleotide
agagtccaaaggctgacaa

SEQ ID NO: 8397 - DNA, 19 bp, Artificial Sequence
  Description of Artificial Sequence: Synthetic oligonucleotide
gagagtccaaaggctgaca

SEQ ID NO: 8398 - DNA, 19 bp, Artificial Sequence
  Description of Artificial Sequence: Synthetic oligonucleotide
ggagagtccaaaggctgac

SEQ ID NO: 8399 - DNA, 19 bp, Artificial Sequence
  Description of Artificial Sequence: Synthetic oligonucleotide
gggagagtccaaaggctga

SEQ ID NO: 8400 - DNA, 19 bp, Artificial Sequence
  Description of Artificial Sequence: Synthetic oligonucleotide
tgggagagtccaaaggctg

SEQ ID NO: 8401 - DNA, 19 bp, Artificial Sequence
  Description of Artificial Sequence: Synthetic oligonucleotide
gtgggagagtccaaaggct

SEQ ID NO: 8402 - DNA, 19 bp, Artificial Sequence
  Description of Artificial Sequence: Synthetic oligonucleotide
tgtgggagagtccaaaggc

SEQ ID NO: 8403 - DNA, 19 bp, Artificial Sequence
  Description of Artificial Sequence: Synthetic oligonucleotide
atgtgggagagtccaaagg

SEQ ID NO: 8404 - DNA, 19 bp, Artificial Sequence
  Description of Artificial Sequence: Synthetic oligonucleotide
aatgtgggagagtccaaag

SEQ ID NO: 8405 - DNA, 19 bp, Artificial Sequence
  Description of Artificial Sequence: Synthetic oligonucleotide
caatgtgggagagtccaaa

SEQ ID NO: 8406 - DNA, 19 bp, Artificial Sequence
  Description of Artificial Sequence: Synthetic oligonucleotide
ccaatgtgggagagtccaa

SEQ ID NO: 8407 - DNA, 19 bp, Artificial Sequence
  Description of Artificial Sequence: Synthetic oligonucleotide
gccaatgtgggagagtcca

SEQ ID NO: 8408 - DNA, 19 bp, Artificial Sequence
  Description of Artificial Sequence: Synthetic oligonucleotide
cgccaatgtgggagagtcc

SEQ ID NO: 8409 - DNA, 19 bp, Artificial Sequence
  Description of Artificial Sequence: Synthetic oligonucleotide
gcgccaatgtgggagagtc

SEQ ID NO: 8410 - DNA, 19 bp, Artificial Sequence
  Description of Artificial Sequence: Synthetic oligonucleotide
tgcgccaatgtgggagagt

SEQ ID NO: 8411 - DNA, 19 bp, Artificial Sequence
  Description of Artificial Sequence: Synthetic oligonucleotide
atgcgccaatgtgggagag

SEQ ID NO: 8412 - DNA, 19 bp, Artificial Sequence
  Description of Artificial Sequence: Synthetic oligonucleotide
gatgcgccaatgtgggaga

SEQ ID NO: 8413 - DNA, 19 bp, Artificial Sequence
  Description of Artificial Sequence: Synthetic oligonucleotide
ggatgcgccaatgtgggag

SEQ ID NO: 8414 - DNA, 19 bp, Artificial Sequence
  Description of Artificial Sequence: Synthetic oligonucleotide
aggatgcgccaatgtggga

SEQ ID NO: 8415 - DNA, 19 bp, Artificial Sequence
  Description of Artificial Sequence: Synthetic oligonucleotide
gaggatgcgccaatgtggg

SEQ ID NO: 8416 - DNA, 19 bp, Artificial Sequence
  Description of Artificial Sequence: Synthetic oligonucleotide
tgaggatgcgccaatgtgg

SEQ ID NO: 8417 - DNA, 19 bp, Artificial Sequence
  Description of Artificial Sequence: Synthetic oligonucleotide
ctgaggatgcgccaatgtg

SEQ ID NO: 8418 - DNA, 19 bp, Artificial Sequence
  Description of Artificial Sequence: Synthetic oligonucleotide
tctgaggatgcgccaatgt

SEQ ID NO: 8419 - DNA, 19 bp, Artificial Sequence
  Description of Artificial Sequence: Synthetic oligonucleotide
atctgaggatgcgccaatg

SEQ ID NO: 8420 - DNA, 19 bp, Artificial Sequence
  Description of Artificial Sequence: Synthetic oligonucleotide
tatctgaggatgcgccaat

SEQ ID NO: 8421 - DNA, 19 bp, Artificial Sequence
  Description of Artificial Sequence: Synthetic oligonucleotide
ctatctgaggatgcgccaa

SEQ ID NO: 8422 - DNA, 19 bp, Artificial Sequence
  Description of Artificial Sequence: Synthetic oligonucleotide
tctatctgaggatgcgcca

SEQ ID NO: 8423 - DNA, 19 bp, Artificial Sequence
  Description of Artificial Sequence: Synthetic oligonucleotide
ttctatctgaggatgcgcc

SEQ ID NO: 8424 - DNA, 19 bp, Artificial Sequence
  Description of Artificial Sequence: Synthetic oligonucleotide
cttctatctgaggatgcgc

SEQ ID NO: 8425 - DNA, 19 bp, Artificial Sequence
  Description of Artificial Sequence: Synthetic oligonucleotide
tcttctatctgaggatgcg

SEQ ID NO: 8426 - DNA, 19 bp, Artificial Sequence
  Description of Artificial Sequence: Synthetic oligonucleotide
gtcttctatctgaggatgc

SEQ ID NO: 8427 - DNA, 19 bp, Artificial Sequence
  Description of Artificial Sequence: Synthetic oligonucleotide
tgtcttctatctgaggatg

SEQ ID NO: 8428 - DNA, 19 bp, Artificial Sequence
  Description of Artificial Sequence: Synthetic oligonucleotide
atgtcttctatctgaggat

SEQ ID NO: 8429 - DNA, 19 bp, Artificial Sequence
  Description of Artificial Sequence: Synthetic oligonucleotide
aatgtcttctatctgagga

SEQ ID NO: 8430 - DNA, 19 bp, Artificial Sequence
  Description of Artificial Sequence: Synthetic oligonucleotide
aaatgtcttctatctgagg

SEQ ID NO: 8431 - DNA, 19 bp, Artificial Sequence
  Description of Artificial Sequence: Synthetic oligonucleotide
gaaatgtcttctatctgag

SEQ ID NO: 8432 - DNA, 19 bp, Artificial Sequence
  Description of Artificial Sequence: Synthetic oligonucleotide
ggaaatgtcttctatctga

SEQ ID NO: 8433 - DNA, 19 bp, Artificial Sequence
  Description of Artificial Sequence: Synthetic oligonucleotide
aggaaatgtcttctatctg

SEQ ID NO: 8434 - DNA, 19 bp, Artificial Sequence
  Description of Artificial Sequence: Synthetic oligonucleotide
caggaaatgtcttctatct

SEQ ID NO: 8435 - DNA, 19 bp, Artificial Sequence
  Description of Artificial Sequence: Synthetic oligonucleotide
tcaggaaatgtcttctatc

SEQ ID NO: 8436 - DNA, 19 bp, Artificial Sequence
  Description of Artificial Sequence: Synthetic oligonucleotide
ttcaggaaatgtcttctat

SEQ ID NO: 8437 - DNA, 19 bp, Artificial Sequence
  Description of Artificial Sequence: Synthetic oligonucleotide
gttcaggaaatgtcttcta

SEQ ID NO: 8438 - DNA, 19 bp, Artificial Sequence
  Description of Artificial Sequence: Synthetic oligonucleotide
ggttcaggaaatgtcttct

SEQ ID NO: 8439 - DNA, 19 bp, Artificial Sequence
  Description of Artificial Sequence: Synthetic oligonucleotide
tggttcaggaaatgtcttc

SEQ ID NO: 8440 - DNA, 19 bp, Artificial Sequence
  Description of Artificial Sequence: Synthetic oligonucleotide
ttggttcaggaaatgtctt

SEQ ID NO: 8441 - DNA, 19 bp, Artificial Sequence
  Description of Artificial Sequence: Synthetic oligonucleotide
cttggttcaggaaatgtct

SEQ ID NO: 8442 - DNA, 19 bp, Artificial Sequence
  Description of Artificial Sequence: Synthetic oligonucleotide
tcttggttcaggaaatgtc

SEQ ID NO: 8443 - DNA, 19 bp, Artificial Sequence
  Description of Artificial Sequence: Synthetic oligonucleotide
gtcttggttcaggaaatgt

SEQ ID NO: 8444 - DNA, 19 bp, Artificial Sequence
  Description of Artificial Sequence: Synthetic oligonucleotide
agtcttggttcaggaaatg

SEQ ID NO: 8445 - DNA, 19 bp, Artificial Sequence
  Description of Artificial Sequence: Synthetic oligonucleotide
gagtcttggttcaggaaat

SEQ ID NO: 8446 - DNA, 19 bp, Artificial Sequence
  Description of Artificial Sequence: Synthetic oligonucleotide
agagtcttggttcaggaaa

SEQ ID NO: 8447 - DNA, 19 bp, Artificial Sequence
  Description of Artificial Sequence: Synthetic oligonucleotide
aagagtcttggttcaggaa

SEQ ID NO: 8448 - DNA, 19 bp, Artificial Sequence
  Description of Artificial Sequence: Synthetic oligonucleotide
aaagagtcttggttcagga

SEQ ID NO: 8449 - DNA, 19 bp, Artificial Sequence
  Description of Artificial Sequence: Synthetic oligonucleotide
taaagagtcttggttcagg

SEQ ID NO: 8450 - DNA, 19 bp, Artificial Sequence
  Description of Artificial Sequence: Synthetic oligonucleotide
gtaaagagtcttggttcag

SEQ ID NO: 8451 - DNA, 19 bp, Artificial Sequence
  Description of Artificial Sequence: Synthetic oligonucleotide
ggtaaagagtcttggttca

SEQ ID NO: 8452 - DNA, 19 bp, Artificial Sequence
  Description of Artificial Sequence: Synthetic oligonucleotide
cggtaaagagtcttggttc

SEQ ID NO: 8453 - DNA, 19 bp, Artificial Sequence
  Description of Artificial Sequence: Synthetic oligonucleotide
acggtaaagagtcttggtt

SEQ ID NO: 8454 - DNA, 19 bp, Artificial Sequence
  Description of Artificial Sequence: Synthetic oligonucleotide
cacggtaaagagtcttggt

SEQ ID NO: 8455 - DNA, 19 bp, Artificial Sequence
  Description of Artificial Sequence: Synthetic oligonucleotide
acacggtaaagagtcttgg

SEQ ID NO: 8456 - DNA, 19 bp, Artificial Sequence
  Description of Artificial Sequence: Synthetic oligonucleotide
tacacggtaaagagtcttg

SEQ ID NO: 8457 - DNA, 19 bp, Artificial Sequence
  Description of Artificial Sequence: Synthetic oligonucleotide
atacacggtaaagagtctt

SEQ ID NO: 8458 - DNA, 19 bp, Artificial Sequence
  Description of Artificial Sequence: Synthetic oligonucleotide
catacacggtaaagagtct

SEQ ID NO: 8459 - DNA, 19 bp, Artificial Sequence
  Description of Artificial Sequence: Synthetic oligonucleotide
tcatacacggtaaagagtc

SEQ ID NO: 8460 - DNA, 19 bp, Artificial Sequence
  Description of Artificial Sequence: Synthetic oligonucleotide
gtcatacacggtaaagagt

SEQ ID NO: 8461 - DNA, 19 bp, Artificial Sequence
  Description of Artificial Sequence: Synthetic oligonucleotide
agtcatacacggtaaagag

SEQ ID NO: 8462 - DNA, 19 bp, Artificial Sequence
  Description of Artificial Sequence: Synthetic oligonucleotide
aagtcatacacggtaaaga

SEQ ID NO: 8463 - DNA, 19 bp, Artificial Sequence
  Description of Artificial Sequence: Synthetic oligonucleotide
aaagtcatacacggtaaag

SEQ ID NO: 8464 - DNA, 19 bp, Artificial Sequence
  Description of Artificial Sequence: Synthetic oligonucleotide
gaaagtcatacacggtaaa

SEQ ID NO: 8465 - DNA, 19 bp, Artificial Sequence
  Description of Artificial Sequence: Synthetic oligonucleotide
ggaaagtcatacacggtaa

SEQ ID NO: 8466 - DNA, 19 bp, Artificial Sequence
  Description of Artificial Sequence: Synthetic oligonucleotide
aggaaagtcatacacggta

SEQ ID NO: 8467 - DNA, 19 bp, Artificial Sequence
  Description of Artificial Sequence: Synthetic oligonucleotide
aaggaaagtcatacacggt

SEQ ID NO: 8468 - DNA, 19 bp, Artificial Sequence
  Description of Artificial Sequence: Synthetic oligonucleotide
gaaggaaagtcatacacgg

SEQ ID NO: 8469 - DNA, 19 bp, Artificial Sequence
  Description of Artificial Sequence: Synthetic oligonucleotide
tgaaggaaagtcatacacg

SEQ ID NO: 8470 - DNA, 19 bp, Artificial Sequence
  Description of Artificial Sequence: Synthetic oligonucleotide
gtgaaggaaagtcatacac

SEQ ID NO: 8471 - DNA, 19 bp, Artificial Sequence
  Description of Artificial Sequence: Synthetic oligonucleotide
tgtgaaggaaagtcataca

SEQ ID NO: 8472 - DNA, 19 bp, Artificial Sequence
  Description of Artificial Sequence: Synthetic oligonucleotide
gtgtgaaggaaagtcatac

SEQ ID NO: 8473 - DNA, 19 bp, Artificial Sequence
  Description of Artificial Sequence: Synthetic oligonucleotide
tgtgtgaaggaaagtcata

SEQ ID NO: 8474 - DNA, 19 bp, Artificial Sequence
  Description of Artificial Sequence: Synthetic oligonucleotide
ctgtgtgaaggaaagtcat

SEQ ID NO: 8475 - DNA, 19 bp, Artificial Sequence
  Description of Artificial Sequence: Synthetic oligonucleotide
tctgtgtgaaggaaagtca

SEQ ID NO: 8476 - DNA, 19 bp, Artificial Sequence
  Description of Artificial Sequence: Synthetic oligonucleotide
ctctgtgtgaaggaaagtc

SEQ ID NO: 8477 - DNA, 19 bp, Artificial Sequence
  Description of Artificial Sequence: Synthetic oligonucleotide
tctctgtgtgaaggaaagt

SEQ ID NO: 8478 - DNA, 19 bp, Artificial Sequence
  Description of Artificial Sequence: Synthetic oligonucleotide
ttctctgtgtgaaggaaag

SEQ ID NO: 8479 - DNA, 19 bp, Artificial Sequence
  Description of Artificial Sequence: Synthetic oligonucleotide
tttctctgtgtgaaggaaa

SEQ ID NO: 8480 - DNA, 19 bp, Artificial Sequence
  Description of Artificial Sequence: Synthetic oligonucleotide
ctttctctgtgtgaaggaa

SEQ ID NO: 8481 - DNA, 19 bp, Artificial Sequence
  Description of Artificial Sequence: Synthetic oligonucleotide
cctttctctgtgtgaagga

SEQ ID NO: 8482 - DNA, 19 bp, Artificial Sequence
  Description of Artificial Sequence: Synthetic oligonucleotide
tcctttctctgtgtgaagg

SEQ ID NO: 8483 - DNA, 19 bp, Artificial Sequence
  Description of Artificial Sequence: Synthetic oligonucleotide
gtcctttctctgtgtgaag

SEQ ID NO: 8484 - DNA, 19 bp, Artificial Sequence
  Description of Artificial Sequence: Synthetic oligonucleotide
tgtcctttctctgtgtgaa

SEQ ID NO: 8485 - DNA, 19 bp, Artificial Sequence
  Description of Artificial Sequence: Synthetic oligonucleotide
atgtcctttctctgtgtga

SEQ ID NO: 8486 - DNA, 19 bp, Artificial Sequence
  Description of Artificial Sequence: Synthetic oligonucleotide
aatgtcctttctctgtgtg

SEQ ID NO: 8487 - DNA, 19 bp, Artificial Sequence
  Description of Artificial Sequence: Synthetic oligonucleotide
caatgtcctttctctgtgt

SEQ ID NO: 8488 - DNA, 19 bp, Artificial Sequence
  Description of Artificial Sequence: Synthetic oligonucleotide
tcaatgtcctttctctgtg

SEQ ID NO: 8489 - DNA, 19 bp, Artificial Sequence
  Description of Artificial Sequence: Synthetic oligonucleotide
atcaatgtcctttctctgt

SEQ ID NO: 8490 - DNA, 19 bp, Artificial Sequence
  Description of Artificial Sequence: Synthetic oligonucleotide
aatcaatgtcctttctctg

SEQ ID NO: 8491 - DNA, 19 bp, Artificial Sequence
  Description of Artificial Sequence: Synthetic oligonucleotide
gaatcaatgtcctttctct

SEQ ID NO: 8492 - DNA, 19 bp, Artificial Sequence
  Description of Artificial Sequence: Synthetic oligonucleotide
agaatcaatgtcctttctc

SEQ ID NO: 8493 - DNA, 19 bp, Artificial Sequence
  Description of Artificial Sequence: Synthetic oligonucleotide
aagaatcaatgtcctttct

SEQ ID NO: 8494 - DNA, 19 bp, Artificial Sequence
  Description of Artificial Sequence: Synthetic oligonucleotide
aaagaatcaatgtcctttc

SEQ ID NO: 8495 - DNA, 19 bp, Artificial Sequence
  Description of Artificial Sequence: Synthetic oligonucleotide
aaaagaatcaatgtccttt

SEQ ID NO: 8496 - DNA, 19 bp, Artificial Sequence
  Description of Artificial Sequence: Synthetic oligonucleotide
caaaagaatcaatgtcctt

SEQ ID NO: 8497 - DNA, 19 bp, Artificial Sequence
  Description of Artificial Sequence: Synthetic oligonucleotide
tcaaaagaatcaatgtcct

SEQ ID NO: 8498 - DNA, 19 bp, Artificial Sequence
  Description of Artificial Sequence: Synthetic oligonucleotide
atcaaaagaatcaatgtcc

SEQ ID NO: 8499 - DNA, 19 bp, Artificial Sequence
  Description of Artificial Sequence: Synthetic oligonucleotide
catcaaaagaatcaatgtc

SEQ ID NO: 8500 - DNA, 19 bp, Artificial Sequence
  Description of Artificial Sequence: Synthetic oligonucleotide
gcatcaaaagaatcaatgt

SEQ ID NO: 8501 - DNA, 19 bp, Artificial Sequence
  Description of Artificial Sequence: Synthetic oligonucleotide
tgcatcaaaagaatcaatg

SEQ ID NO: 8502 - DNA, 19 bp, Artificial Sequence
  Description of Artificial Sequence: Synthetic oligonucleotide
gtgcatcaaaagaatcaat

SEQ ID NO: 8503 - DNA, 19 bp, Artificial Sequence
  Description of Artificial Sequence: Synthetic oligonucleotide
agtgcatcaaaagaatcaa

SEQ ID NO: 8504 - DNA, 19 bp, Artificial Sequence
  Description of Artificial Sequence: Synthetic oligonucleotide
aagtgcatcaaaagaatca

SEQ ID NO: 8505 - DNA, 19 bp, Artificial Sequence
  Description of Artificial Sequence: Synthetic oligonucleotide
caagtgcatcaaaagaatc

SEQ ID NO: 8506 - DNA, 19 bp, Artificial Sequence
  Description of Artificial Sequence: Synthetic oligonucleotide
tcaagtgcatcaaaagaat

SEQ ID NO: 8507 - DNA, 19 bp, Artificial Sequence
  Description of Artificial Sequence: Synthetic oligonucleotide
ttcaagtgcatcaaaagaa

SEQ ID NO: 8508 - DNA, 19 bp, Artificial Sequence
  Description of Artificial Sequence: Synthetic oligonucleotide
attcaagtgcatcaaaaga

SEQ ID NO: 8509 - DNA, 19 bp, Artificial Sequence
  Description of Artificial Sequence: Synthetic oligonucleotide
cattcaagtgcatcaaaag

SEQ ID NO: 8510 - DNA, 19 bp, Artificial Sequence
  Description of Artificial Sequence: Synthetic oligonucleotide
gcattcaagtgcatcaaaa

SEQ ID NO: 8511 - DNA, 19 bp, Artificial Sequence
  Description of Artificial Sequence: Synthetic oligonucleotide
ggcattcaagtgcatcaaa

SEQ ID NO: 8512 - DNA, 19 bp, Artificial Sequence
  Description of Artificial Sequence: Synthetic oligonucleotide
aggcattcaagtgcatcaa

SEQ ID NO: 8513 - DNA, 19 bp, Artificial Sequence
  Description of Artificial Sequence: Synthetic oligonucleotide
aaggcattcaagtgcatca

SEQ ID NO: 8514 - DNA, 19 bp, Artificial Sequence
  Description of Artificial Sequence: Synthetic oligonucleotide
caaggcattcaagtgcatc

SEQ ID NO: 8515 - DNA, 19 bp, Artificial Sequence
  Description of Artificial Sequence: Synthetic oligonucleotide
tcaaggcattcaagtgcat

SEQ ID NO: 8516 - DNA, 19 bp, Artificial Sequence
  Description of Artificial Sequence: Synthetic oligonucleotide
ctcaaggcattcaagtgca

SEQ ID NO: 8517 - DNA, 19 bp, Artificial Sequence
  Description of Artificial Sequence: Synthetic oligonucleotide
tctcaaggcattcaagtgc

SEQ ID NO: 8518 - DNA, 19 bp, Artificial Sequence
  Description of Artificial Sequence: Synthetic oligonucleotide
gtctcaaggcattcaagtg

SEQ ID NO: 8519 - DNA, 19 bp, Artificial Sequence
  Description of Artificial Sequence: Synthetic oligonucleotide
ggtctcaaggcattcaagt

SEQ ID NO: 8520 - DNA, 19 bp, Artificial Sequence
  Description of Artificial Sequence: Synthetic oligonucleotide
aggtctcaaggcattcaag

SEQ ID NO: 8521 - DNA, 19 bp, Artificial Sequence
  Description of Artificial Sequence: Synthetic oligonucleotide
caggtctcaaggcattcaa

SEQ ID NO: 8522 - DNA, 19 bp, Artificial Sequence
  Description of Artificial Sequence: Synthetic oligonucleotide
gcaggtctcaaggcattca

SEQ ID NO: 8523 - DNA, 19 bp, Artificial Sequence
  Description of Artificial Sequence: Synthetic oligonucleotide
ggcaggtctcaaggcattc

SEQ ID NO: 8524 - DNA, 19 bp, Artificial Sequence
  Description of Artificial Sequence: Synthetic oligonucleotide
cggcaggtctcaaggcatt

SEQ ID NO: 8525 - DNA, 19 bp, Artificial Sequence
  Description of Artificial Sequence: Synthetic oligonucleotide
acggcaggtctcaaggcat

SEQ ID NO: 8526 - DNA, 19 bp, Artificial Sequence
  Description of Artificial Sequence: Synthetic oligonucleotide
aacggcaggtctcaaggca

SEQ ID NO: 8527 - DNA, 19 bp, Artificial Sequence
  Description of Artificial Sequence: Synthetic oligonucleotide
caacggcaggtctcaaggc

SEQ ID NO: 8528 - DNA, 19 bp, Artificial Sequence
  Description of Artificial Sequence: Synthetic oligonucleotide
gcaacggcaggtctcaagg

SEQ ID NO: 8529 - DNA, 19 bp, Artificial Sequence
  Description of Artificial Sequence: Synthetic oligonucleotide
ggcaacggcaggtctcaag

SEQ ID NO: 8530 - DNA, 19 bp, Artificial Sequence
  Description of Artificial Sequence: Synthetic oligonucleotide
aggcaacggcaggtctcaa

SEQ ID NO: 8531 - DNA, 19 bp, Artificial Sequence
  Description of Artificial Sequence: Synthetic oligonucleotide
gaggcaacggcaggtctca

SEQ ID NO: 8532 - DNA, 19 bp, Artificial Sequence
  Description of Artificial Sequence: Synthetic oligonucleotide
agaggcaacggcaggtctc

SEQ ID NO: 8533 - DNA, 19 bp, Artificial Sequence
  Description of Artificial Sequence: Synthetic oligonucleotide
gagaggcaacggcaggtct

SEQ ID NO: 8534 - DNA, 19 bp, Artificial Sequence
  Description of Artificial Sequence: Synthetic oligonucleotide
ggagaggcaacggcaggtc

SEQ ID NO: 8535 - DNA, 19 bp, Artificial Sequence
  Description of Artificial Sequence: Synthetic oligonucleotide
aggagaggcaacggcaggt

SEQ ID NO: 8536 - DNA, 19 bp, Artificial Sequence
  Description of Artificial Sequence: Synthetic oligonucleotide
gaggagaggcaacggcagg

SEQ ID NO: 8537 - DNA, 19 bp, Artificial Sequence
  Description of Artificial Sequence: Synthetic oligonucleotide
agaggagaggcaacggcag

SEQ ID NO: 8538 - DNA, 19 bp, Artificial Sequence
  Description of Artificial Sequence: Synthetic oligonucleotide
gagaggagaggcaacggca

SEQ ID NO: 8539 - DNA, 19 bp, Artificial Sequence
  Description of Artificial Sequence: Synthetic oligonucleotide
ggagaggagaggcaacggc

SEQ ID NO: 8540 - DNA, 19 bp, Artificial Sequence
  Description of Artificial Sequence: Synthetic oligonucleotide
gggagaggagaggcaacgg

SEQ ID NO: 8541 - DNA, 19 bp, Artificial Sequence
  Description of Artificial Sequence: Synthetic oligonucleotide
ggggagaggagaggcaacg

SEQ ID NO: 8542 - DNA, 19 bp, Artificial Sequence
  Description of Artificial Sequence: Synthetic oligonucleotide
tggggagaggagaggcaac

SEQ ID NO: 8543 - DNA, 19 bp, Artificial Sequence
  Description of Artificial Sequence: Synthetic oligonucleotide
gtggggagaggagaggcaa

SEQ ID NO: 8544 - DNA, 19 bp, Artificial Sequence
  Description of Artificial Sequence: Synthetic oligonucleotide
ggtggggagaggagaggca

SEQ ID NO: 8545 - DNA, 19 bp, Artificial Sequence
  Description of Artificial Sequence: Synthetic oligonucleotide
aggtggggagaggagaggc

SEQ ID NO: 8546 - DNA, 19 bp, Artificial Sequence
  Description of Artificial Sequence: Synthetic oligonucleotide
gaggtggggagaggagagg

SEQ ID NO: 8547 - DNA, 19 bp, Artificial Sequence
  Description of Artificial Sequence: Synthetic oligonucleotide
agaggtggggagaggagag

SEQ ID NO: 8548 - DNA, 19 bp, Artificial Sequence
  Description of Artificial Sequence: Synthetic oligonucleotide
aagaggtggggagaggaga

SEQ ID NO: 8549 - DNA, 19 bp, Artificial Sequence
  Description of Artificial Sequence: Synthetic oligonucleotide
gaagaggtggggagaggag

SEQ ID NO: 8550 - DNA, 19 bp, Artificial Sequence
  Description of Artificial Sequence: Synthetic oligonucleotide
ggaagaggtggggagagga

SEQ ID NO: 8551 - DNA, 19 bp, Artificial Sequence
  Description of Artificial Sequence: Synthetic oligonucleotide
tggaagaggtggggagagg

SEQ ID NO: 8552 - DNA, 19 bp, Artificial Sequence
  Description of Artificial Sequence: Synthetic oligonucleotide
ctggaagaggtggggagag

SEQ ID NO: 8553 - DNA, 19 bp, Artificial Sequence
  Description of Artificial Sequence: Synthetic oligonucleotide
gctggaagaggtggggaga

SEQ ID NO: 8554 - DNA, 19 bp, Artificial Sequence
  Description of Artificial Sequence: Synthetic oligonucleotide
ggctggaagaggtggggag

SEQ ID NO: 8555 - DNA, 19 bp, Artificial Sequence
  Description of Artificial Sequence: Synthetic oligonucleotide
aggctggaagaggtgggga

SEQ ID NO: 8556 - DNA, 19 bp, Artificial Sequence
  Description of Artificial Sequence: Synthetic oligonucleotide
gaggctggaagaggtgggg

SEQ ID NO: 8557 - DNA, 19 bp, Artificial Sequence
  Description of Artificial Sequence: Synthetic oligonucleotide
agaggctggaagaggtggg

SEQ ID NO: 8558 - DNA, 19 bp, Artificial Sequence
  Description of Artificial Sequence: Synthetic oligonucleotide
cagaggctggaagaggtgg

SEQ ID NO: 8559 - DNA, 19 bp, Artificial Sequence
  Description of Artificial Sequence: Synthetic oligonucleotide
gcagaggctggaagaggtg

SEQ ID NO: 8560 - DNA, 19 bp, Artificial Sequence
  Description of Artificial Sequence: Synthetic oligonucleotide
cgcagaggctggaagaggt

SEQ ID NO: 8561 - DNA, 19 bp, Artificial Sequence
  Description of Artificial Sequence: Synthetic oligonucleotide
gcgcagaggctggaagagg

SEQ ID NO: 8562 - DNA, 19 bp, Artificial Sequence
  Description of Artificial Sequence: Synthetic oligonucleotide
ggcgcagaggctggaagag

SEQ ID NO: 8563 - DNA, 19 bp, Artificial Sequence
  Description of Artificial Sequence: Synthetic oligonucleotide
tggcgcagaggctggaaga

SEQ ID NO: 8564 - DNA, 19 bp, Artificial Sequence
  Description of Artificial Sequence: Synthetic oligonucleotide
atggcgcagaggctggaag

SEQ ID NO: 8565 - DNA, 19 bp, Artificial Sequence
  Description of Artificial Sequence: Synthetic oligonucleotide
catggcgcagaggctggaa

SEQ ID NO: 8566 - DNA, 19 bp, Artificial Sequence
  Description of Artificial Sequence: Synthetic oligonucleotide
tcatggcgcagaggctgga

SEQ ID NO: 8567 - DNA, 19 bp, Artificial Sequence
  Description of Artificial Sequence: Synthetic oligonucleotide
ctcatggcgcagaggctgg

SEQ ID NO: 8568 - DNA, 19 bp, Artificial Sequence
  Description of Artificial Sequence: Synthetic oligonucleotide
gctcatggcgcagaggctg

SEQ ID NO: 8569 - DNA, 19 bp, Artificial Sequence
  Description of Artificial Sequence: Synthetic oligonucleotide
tgctcatggcgcagaggct

SEQ ID NO: 8570 - DNA, 19 bp, Artificial Sequence
  Description of Artificial Sequence: Synthetic oligonucleotide
ctgctcatggcgcagaggc

SEQ ID NO: 8571 - DNA, 19 bp, Artificial Sequence
  Description of Artificial Sequence: Synthetic oligonucleotide
actgctcatggcgcagagg

SEQ ID NO: 8572 - DNA, 19 bp, Artificial Sequence
  Description of Artificial Sequence: Synthetic oligonucleotide
cactgctcatggcgcagag

SEQ ID NO: 8573 - DNA, 19 bp, Artificial Sequence
  Description of Artificial Sequence: Synthetic oligonucleotide
acactgctcatggcgcaga

SEQ ID NO: 8574 - DNA, 19 bp, Artificial Sequence
  Description of Artificial Sequence: Synthetic oligonucleotide
cacactgctcatggcgcag

SEQ ID NO: 8575 - DNA, 19 bp, Artificial Sequence
  Description of Artificial Sequence: Synthetic oligonucleotide
acacactgctcatggcgca

SEQ ID NO: 8576 - DNA, 19 bp, Artificial Sequence
  Description of Artificial Sequence: Synthetic oligonucleotide
aacacactgctcatggcgc

SEQ ID NO: 8577 - DNA, 19 bp, Artificial Sequence
  Description of Artificial Sequence: Synthetic oligonucleotide
aaacacactgctcatggcg

SEQ ID NO: 8578 - DNA, 19 bp, Artificial Sequence
  Description of Artificial Sequence: Synthetic oligonucleotide
caaacacactgctcatggc

SEQ ID NO: 8579 - DNA, 19 bp, Artificial Sequence
  Description of Artificial Sequence: Synthetic oligonucleotide
tcaaacacactgctcatgg

SEQ ID NO: 8580 - DNA, 19 bp, Artificial Sequence
  Description of Artificial Sequence: Synthetic oligonucleotide
ttcaaacacactgctcatg

SEQ ID NO: 8581 - DNA, 19 bp, Artificial Sequence
  Description of Artificial Sequence: Synthetic oligonucleotide
cttcaaacacactgctcat

SEQ ID NO: 8582 - DNA, 19 bp, Artificial Sequence
  Description of Artificial Sequence: Synthetic oligonucleotide
acttcaaacacactgctca

SEQ ID NO: 8583 - DNA, 19 bp, Artificial Sequence
  Description of Artificial Sequence: Synthetic oligonucleotide
aacttcaaacacactgctc

SEQ ID NO: 8584 - DNA, 19 bp, Artificial Sequence
  Description of Artificial Sequence: Synthetic oligonucleotide
aaacttcaaacacactgct

SEQ ID NO: 8585 - DNA, 19 bp, Artificial Sequence
  Description of Artificial Sequence: Synthetic oligonucleotide
gaaacttcaaacacactgc

SEQ ID NO: 8586 - DNA, 19 bp, Artificial Sequence
  Description of Artificial Sequence: Synthetic oligonucleotide
tgaaacttcaaacacactg

SEQ ID NO: 8587 - DNA, 19 bp, Artificial Sequence
  Description of Artificial Sequence: Synthetic oligonucleotide
ctgaaacttcaaacacact

SEQ ID NO: 8588 - DNA, 19 bp, Artificial Sequence
  Description of Artificial Sequence: Synthetic oligonucleotide
gctgaaacttcaaacacac

SEQ ID NO: 8589 - DNA, 19 bp, Artificial Sequence
  Description of Artificial Sequence: Synthetic oligonucleotide
agctgaaacttcaaacaca

SEQ ID NO: 8590 - DNA, 19 bp, Artificial Sequence
  Description of Artificial Sequence: Synthetic oligonucleotide
aagctgaaacttcaaacac

SEQ ID NO: 8591 - DNA, 19 bp, Artificial Sequence
  Description of Artificial Sequence: Synthetic oligonucleotide
aaagctgaaacttcaaaca

SEQ ID NO: 8592 - DNA, 19 bp, Artificial Sequence
  Description of Artificial Sequence: Synthetic oligonucleotide
caaagctgaaacttcaaac

SEQ ID NO: 8593 - DNA, 19 bp, Artificial Sequence
  Description of Artificial Sequence: Synthetic oligonucleotide
tcaaagctgaaacttcaaa

SEQ ID NO: 8594 - DNA, 19 bp, Artificial Sequence
  Description of Artificial Sequence: Synthetic oligonucleotide
ttcaaagctgaaacttcaa

SEQ ID NO: 8595 - DNA, 19 bp, Artificial Sequence
  Description of Artificial Sequence: Synthetic oligonucleotide
attcaaagctgaaacttca

SEQ ID NO: 8596 - DNA, 19 bp, Artificial Sequence
  Description of Artificial Sequence: Synthetic oligonucleotide
cattcaaagctgaaacttc

SEQ ID NO: 8597 - DNA, 19 bp, Artificial Sequence
  Description of Artificial Sequence: Synthetic oligonucleotide
acattcaaagctgaaactt

SEQ ID NO: 8598 - DNA, 19 bp, Artificial Sequence
  Description of Artificial Sequence: Synthetic oligonucleotide
gacattcaaagctgaaact

SEQ ID NO: 8599 - DNA, 19 bp, Artificial Sequence
  Description of Artificial Sequence: Synthetic oligonucleotide
agacattcaaagctgaaac

SEQ ID NO: 8600 - DNA, 19 bp, Artificial Sequence
  Description of Artificial Sequence: Synthetic oligonucleotide
aagacattcaaagctgaaa

SEQ ID NO: 8601 - DNA, 19 bp, Artificial Sequence
  Description of Artificial Sequence: Synthetic oligonucleotide
gaagacattcaaagctgaa

SEQ ID NO: 8602 - DNA, 19 bp, Artificial Sequence
  Description of Artificial Sequence: Synthetic oligonucleotide
ggaagacattcaaagctga

SEQ ID NO: 8603 - DNA, 19 bp, Artificial Sequence
  Description of Artificial Sequence: Synthetic oligonucleotide
gggaagacattcaaagctg

SEQ ID NO: 8604 - DNA, 19 bp, Artificial Sequence
  Description of Artificial Sequence: Synthetic oligonucleotide
cgggaagacattcaaagct

SEQ ID NO: 8605 - DNA, 19 bp, Artificial Sequence
  Description of Artificial Sequence: Synthetic oligonucleotide
gcgggaagacattcaaagc

SEQ ID NO: 8606 - DNA, 19 bp, Artificial Sequence
  Description of Artificial Sequence: Synthetic oligonucleotide
ggcgggaagacattcaaag

SEQ ID NO: 8607 - DNA, 19 bp, Artificial Sequence
  Description of Artificial Sequence: Synthetic oligonucleotide
gggcgggaagacattcaaa

SEQ ID NO: 8608 - DNA, 19 bp, Artificial Sequence
  Description of Artificial Sequence: Synthetic oligonucleotide
cgggcgggaagacattcaa

SEQ ID NO: 8609 - DNA, 19 bp, Artificial Sequence
  Description of Artificial Sequence: Synthetic oligonucleotide
tcgggcgggaagacattca

SEQ ID NO: 8610 - DNA, 19 bp, Artificial Sequence
  Description of Artificial Sequence: Synthetic oligonucleotide
atcgggcgggaagacattc

SEQ ID NO: 8611 - DNA, 19 bp, Artificial Sequence
  Description of Artificial Sequence: Synthetic oligonucleotide
gatcgggcgggaagacatt

SEQ ID NO: 8612 - DNA, 19 bp, Artificial Sequence
  Description of Artificial Sequence: Synthetic oligonucleotide
ggatcgggcgggaagacat

SEQ ID NO: 8613 - DNA, 19 bp, Artificial Sequence
  Description of Artificial Sequence: Synthetic oligonucleotide
cggatcgggcgggaagaca

SEQ ID NO: 8614 - DNA, 19 bp, Artificial Sequence
  Description of Artificial Sequence: Synthetic oligonucleotide
acggatcgggcgggaagac

SEQ ID NO: 8615 - DNA, 19 bp, Artificial Sequence
  Description of Artificial Sequence: Synthetic oligonucleotide
cacggatcgggcgggaaga

SEQ ID NO: 8616 - DNA, 19 bp, Artificial Sequence
  Description of Artificial Sequence: Synthetic oligonucleotide
ccacggatcgggcgggaag

SEQ ID NO: 8617 - DNA, 19 bp, Artificial Sequence
  Description of Artificial Sequence: Synthetic oligonucleotide
gccacggatcgggcgggaa

SEQ ID NO: 8618 - DNA, 19 bp, Artificial Sequence
  Description of Artificial Sequence: Synthetic oligonucleotide
ggccacggatcgggcggga

SEQ ID NO: 8619 - DNA, 19 bp, Artificial Sequence
  Description of Artificial Sequence: Synthetic oligonucleotide
aggccacggatcgggcggg

SEQ ID NO: 8620 - DNA, 19 bp, Artificial Sequence
  Description of Artificial Sequence: Synthetic oligonucleotide
caggccacggatcgggcgg

SEQ ID NO: 8621 - DNA, 19 bp, Artificial Sequence
  Description of Artificial Sequence: Synthetic oligonucleotide
tcaggccacggatcgggcg

SEQ ID NO: 8622 - DNA, 19 bp, Artificial Sequence
  Description of Artificial Sequence: Synthetic oligonucleotide
ctcaggccacggatcgggc

SEQ ID NO: 8623 - DNA, 19 bp, Artificial Sequence
  Description of Artificial Sequence: Synthetic oligonucleotide
tctcaggccacggatcggg

SEQ ID NO: 8624 - DNA, 19 bp, Artificial Sequence
  Description of Artificial Sequence: Synthetic oligonucleotide
ttctcaggccacggatcgg

SEQ ID NO: 8625 - DNA, 19 bp, Artificial Sequence
  Description of Artificial Sequence: Synthetic oligonucleotide
gttctcaggccacggatcg

SEQ ID NO: 8626 - DNA, 19 bp, Artificial Sequence
  Description of Artificial Sequence: Synthetic oligonucleotide
agttctcaggccacggatc

SEQ ID NO: 8627 - DNA, 19 bp, Artificial Sequence
  Description of Artificial Sequence: Synthetic oligonucleotide
aagttctcaggccacggat

SEQ ID NO: 8628 - DNA, 19 bp, Artificial Sequence
  Description of Artificial Sequence: Synthetic oligonucleotide
gaagttctcaggccacgga

SEQ ID NO: 8629 - DNA, 19 bp, Artificial Sequence
  Description of Artificial Sequence: Synthetic oligonucleotide
tgaagttctcaggccacgg

SEQ ID NO: 8630 - DNA, 19 bp, Artificial Sequence
  Description of Artificial Sequence: Synthetic oligonucleotide
atgaagttctcaggccacg

SEQ ID NO: 8631 - DNA, 19 bp, Artificial Sequence
  Description of Artificial Sequence: Synthetic oligonucleotide
tatgaagttctcaggccac

SEQ ID NO: 8632 - DNA, 19 bp, Artificial Sequence
  Description of Artificial Sequence: Synthetic oligonucleotide
ctatgaagttctcaggcca

SEQ ID NO: 8633 - DNA, 19 bp, Artificial Sequence
  Description of Artificial Sequence: Synthetic oligonucleotide
tctatgaagttctcaggcc

SEQ ID NO: 8634 - DNA, 19 bp, Artificial Sequence
  Description of Artificial Sequence: Synthetic oligonucleotide
ctctatgaagttctcaggc

SEQ ID NO: 8635 - DNA, 19 bp, Artificial Sequence
  Description of Artificial Sequence: Synthetic oligonucleotide
cctctatgaagttctcagg

SEQ ID NO: 8636 - DNA, 19 bp, Artificial Sequence
  Description of Artificial Sequence: Synthetic oligonucleotide
acctctatgaagttctcag

SEQ ID NO: 8637 - DNA, 19 bp, Artificial Sequence
  Description of Artificial Sequence: Synthetic oligonucleotide
cacctctatgaagttctca

SEQ ID NO: 8638 - DNA, 19 bp, Artificial Sequence
  Description of Artificial Sequence: Synthetic oligonucleotide
acacctctatgaagttctc

SEQ ID NO: 8639 - DNA, 19 bp, Artificial Sequence
  Description of Artificial Sequence: Synthetic oligonucleotide
cacacctctatgaagttct

SEQ ID NO: 8640 - DNA, 19 bp, Artificial Sequence
  Description of Artificial Sequence: Synthetic oligonucleotide
tcacacctctatgaagttc

SEQ ID NO: 8641 - DNA, 19 bp, Artificial Sequence
  Description of Artificial Sequence: Synthetic oligonucleotide
atcacacctctatgaagtt

SEQ ID NO: 8642 - DNA, 19 bp, Artificial Sequence
  Description of Artificial Sequence: Synthetic oligonucleotide
aatcacacctctatgaagt

SEQ ID NO: 8643 - DNA, 19 bp, Artificial Sequence
  Description of Artificial Sequence: Synthetic oligonucleotide
caatcacacctctatgaag

SEQ ID NO: 8644 - DNA, 19 bp, Artificial Sequence
  Description of Artificial Sequence: Synthetic oligonucleotide
gcaatcacacctctatgaa

SEQ ID NO: 8645 - DNA, 19 bp, Artificial Sequence
  Description of Artificial Sequence: Synthetic oligonucleotide
tgcaatcacacctctatga

SEQ ID NO: 8646 - DNA, 19 bp, Artificial Sequence
  Description of Artificial Sequence: Synthetic oligonucleotide
gtgcaatcacacctctatg

SEQ ID NO: 8647 - DNA, 19 bp, Artificial Sequence
  Description of Artificial Sequence: Synthetic oligonucleotide
agtgcaatcacacctctat

SEQ ID NO: 8648 - DNA, 19 bp, Artificial Sequence
  Description of Artificial Sequence: Synthetic oligonucleotide
aagtgcaatcacacctcta

SEQ ID NO: 8649 - DNA, 19 bp, Artificial Sequence
  Description of Artificial Sequence: Synthetic oligonucleotide
aaagtgcaatcacacctct

SEQ ID NO: 8650 - DNA, 19 bp, Artificial Sequence
  Description of Artificial Sequence: Synthetic oligonucleotide
taaagtgcaatcacacctc

SEQ ID NO: 8651 - DNA, 19 bp, Artificial Sequence
  Description of Artificial Sequence: Synthetic oligonucleotide
ataaagtgcaatcacacct

SEQ ID NO: 8652 - DNA, 19 bp, Artificial Sequence
  Description of Artificial Sequence: Synthetic oligonucleotide
cataaagtgcaatcacacc

SEQ ID NO: 8653 - DNA, 19 bp, Artificial Sequence
  Description of Artificial Sequence: Synthetic oligonucleotide
acataaagtgcaatcacac

SEQ ID NO: 8654 - DNA, 19 bp, Artificial Sequence
  Description of Artificial Sequence: Synthetic oligonucleotide
gacataaagtgcaatcaca

SEQ ID NO: 8655 - DNA, 19 bp, Artificial Sequence
  Description of Artificial Sequence: Synthetic oligonucleotide
agacataaagtgcaatcac

SEQ ID NO: 8656 - DNA, 19 bp, Artificial Sequence
  Description of Artificial Sequence: Synthetic oligonucleotide
cagacataaagtgcaatca

SEQ ID NO: 8657 - DNA, 19 bp, Artificial Sequence
  Description of Artificial Sequence: Synthetic oligonucleotide
gcagacataaagtgcaatc

SEQ ID NO: 8658 - DNA, 19 bp, Artificial Sequence
  Description of Artificial Sequence: Synthetic oligonucleotide
tgcagacataaagtgcaat

SEQ ID NO: 8659 - DNA, 19 bp, Artificial Sequence
  Description of Artificial Sequence: Synthetic oligonucleotide
ctgcagacataaagtgcaa

SEQ ID NO: 8660 - DNA, 19 bp, Artificial Sequence
  Description of Artificial Sequence: Synthetic oligonucleotide
tctgcagacataaagtgca

SEQ ID NO: 8661 - DNA, 19 bp, Artificial Sequence
  Description of Artificial Sequence: Synthetic oligonucleotide
ctctgcagacataaagtgc

SEQ ID NO: 8662 - DNA, 19 bp, Artificial Sequence
  Description of Artificial Sequence: Synthetic oligonucleotide
tctctgcagacataaagtg

SEQ ID NO: 8663 - DNA, 19 bp, Artificial Sequence
  Description of Artificial Sequence: Synthetic oligonucleotide
ctctctgcagacataaagt

SEQ ID NO: 8664 - DNA, 19 bp, Artificial Sequence
  Description of Artificial Sequence: Synthetic oligonucleotide
gctctctgcagacataaag

SEQ ID NO: 8665 - DNA, 19 bp, Artificial Sequence
  Description of Artificial Sequence: Synthetic oligonucleotide
agctctctgcagacataaa

SEQ ID NO: 8666 - DNA, 19 bp, Artificial Sequence
  Description of Artificial Sequence: Synthetic oligonucleotide
cagctctctgcagacataa

SEQ ID NO: 8667 - DNA, 19 bp, Artificial Sequence
  Description of Artificial Sequence: Synthetic oligonucleotide
ccagctctctgcagacata

SEQ ID NO: 8668 - DNA, 19 bp, Artificial Sequence
  Description of Artificial Sequence: Synthetic oligonucleotide
cccagctctctgcagacat

SEQ ID NO: 8669 - DNA, 19 bp, Artificial Sequence
  Description of Artificial Sequence: Synthetic oligonucleotide
ccccagctctctgcagaca

SEQ ID NO: 8670 - DNA, 19 bp, Artificial Sequence
  Description of Artificial Sequence: Synthetic oligonucleotide
gccccagctctctgcagac

SEQ ID NO: 8671 - DNA, 19 bp, Artificial Sequence
  Description of Artificial Sequence: Synthetic oligonucleotide
cgccccagctctctgcaga

SEQ ID NO: 8672 - DNA, 19 bp, Artificial Sequence
  Description of Artificial Sequence: Synthetic oligonucleotide
tcgccccagctctctgcag

SEQ ID NO: 8673 - DNA, 19 bp, Artificial Sequence
  Description of Artificial Sequence: Synthetic oligonucleotide
ctcgccccagctctctgca

SEQ ID NO: 8674 - DNA, 19 bp, Artificial Sequence
  Description of Artificial Sequence: Synthetic oligonucleotide
actcgccccagctctctgc

SEQ ID NO: 8675 - DNA, 19 bp, Artificial Sequence
  Description of Artificial Sequence: Synthetic oligonucleotide
cactcgccccagctctctg

SEQ ID NO: 8676 - DNA, 19 bp, Artificial Sequence
  Description of Artificial Sequence: Synthetic oligonucleotide
acactcgccccagctctct

SEQ ID NO: 8677 - DNA, 19 bp, Artificial Sequence
  Description of Artificial Sequence: Synthetic oligonucleotide
cacactcgccccagctctc

SEQ ID NO: 8678 - DNA, 19 bp, Artificial Sequence
  Description of Artificial Sequence: Synthetic oligonucleotide
acacactcgccccagctct

SEQ ID NO: 8679 - DNA, 19 bp, Artificial Sequence
  Description of Artificial Sequence: Synthetic oligonucleotide
aacacactcgccccagctc

SEQ ID NO: 8680 - DNA, 19 bp, Artificial Sequence
  Description of Artificial Sequence: Synthetic oligonucleotide
aaacacactcgccccagct

SEQ ID NO: 8681 - DNA, 19 bp, Artificial Sequence
  Description of Artificial Sequence: Synthetic oligonucleotide
taaacacactcgccccagc

SEQ ID NO: 8682 - DNA, 19 bp, Artificial Sequence
  Description of Artificial Sequence: Synthetic oligonucleotide
ctaaacacactcgccccag

SEQ ID NO: 8683 - DNA, 19 bp, Artificial Sequence
  Description of Artificial Sequence: Synthetic oligonucleotide
cctaaacacactcgcccca

SEQ ID NO: 8684 - DNA, 19 bp, Artificial Sequence
  Description of Artificial Sequence: Synthetic oligonucleotide
ccctaaacacactcgcccc

SEQ ID NO: 8685 - DNA, 19 bp, Artificial Sequence
  Description of Artificial Sequence: Synthetic oligonucleotide
cccctaaacacactcgccc

SEQ ID NO: 8686 - DNA, 19 bp, Artificial Sequence
  Description of Artificial Sequence: Synthetic oligonucleotide
acccctaaacacactcgcc

SEQ ID NO: 8687 - DNA, 19 bp, Artificial Sequence
  Description of Artificial Sequence: Synthetic oligonucleotide
cacccctaaacacactcgc

SEQ ID NO: 8688 - DNA, 19 bp, Artificial Sequence
  Description of Artificial Sequence: Synthetic oligonucleotide
ccacccctaaacacactcg

SEQ ID NO: 8689 - DNA, 19 bp, Artificial Sequence
  Description of Artificial Sequence: Synthetic oligonucleotide
gccacccctaaacacactc

SEQ ID NO: 8690 - DNA, 19 bp, Artificial Sequence
  Description of Artificial Sequence: Synthetic oligonucleotide
tgccacccctaaacacact

SEQ ID NO: 8691 - DNA, 19 bp, Artificial Sequence
  Description of Artificial Sequence: Synthetic oligonucleotide
ctgccacccctaaacacac

SEQ ID NO: 8692 - DNA, 19 bp, Artificial Sequence
  Description of Artificial Sequence: Synthetic oligonucleotide
gctgccacccctaaacaca

SEQ ID NO: 8693 - DNA, 19 bp, Artificial Sequence
  Description of Artificial Sequence: Synthetic oligonucleotide
agctgccacccctaaacac

SEQ ID NO: 8694 - DNA, 19 bp, Artificial Sequence
  Description of Artificial Sequence: Synthetic oligonucleotide
cagctgccacccctaaaca

SEQ ID NO: 8695 - DNA, 19 bp, Artificial Sequence
  Description of Artificial Sequence: Synthetic oligonucleotide
gcagctgccacccctaaac

SEQ ID NO: 8696 - DNA, 19 bp, Artificial Sequence
  Description of Artificial Sequence: Synthetic oligonucleotide
ggcagctgccacccctaaa

SEQ ID NO: 8697 - DNA, 19 bp, Artificial Sequence
  Description of Artificial Sequence: Synthetic oligonucleotide
aggcagctgccacccctaa

SEQ ID NO: 8698 - DNA, 19 bp, Artificial Sequence
  Description of Artificial Sequence: Synthetic oligonucleotide
aaggcagctgccaccccta

SEQ ID NO: 8699 - DNA, 19 bp, Artificial Sequence
  Description of Artificial Sequence: Synthetic oligonucleotide
gaaggcagctgccacccct

SEQ ID NO: 8700 - DNA, 19 bp, Artificial Sequence
  Description of Artificial Sequence: Synthetic oligonucleotide
agaaggcagctgccacccc

SEQ ID NO: 8701 - DNA, 19 bp, Artificial Sequence
  Description of Artificial Sequence: Synthetic oligonucleotide
aagaaggcagctgccaccc

SEQ ID NO: 8702 - DNA, 19 bp, Artificial Sequence
  Description of Artificial Sequence: Synthetic oligonucleotide
gaagaaggcagctgccacc

SEQ ID NO: 8703 - DNA, 19 bp, Artificial Sequence
  Description of Artificial Sequence: Synthetic oligonucleotide
agaagaaggcagctgccac

SEQ ID NO: 8704 - DNA, 19 bp, Artificial Sequence
  Description of Artificial Sequence: Synthetic oligonucleotide
gagaagaaggcagctgcca

SEQ ID NO: 8705 - DNA, 19 bp, Artificial Sequence
  Description of Artificial Sequence: Synthetic oligonucleotide
agagaagaaggcagctgcc

SEQ ID NO: 8706 - DNA, 19 bp, Artificial Sequence
  Description of Artificial Sequence: Synthetic oligonucleotide
gagagaagaaggcagctgc

SEQ ID NO: 8707 - DNA, 19 bp, Artificial Sequence
  Description of Artificial Sequence: Synthetic oligonucleotide
agagagaagaaggcagctg

SEQ ID NO: 8708 - DNA, 19 bp, Artificial Sequence
  Description of Artificial Sequence: Synthetic oligonucleotide
cagagagaagaaggcagct

SEQ ID NO: 8709 - DNA, 19 bp, Artificial Sequence
  Description of Artificial Sequence: Synthetic oligonucleotide
acagagagaagaaggcagc

SEQ ID NO: 8710 - DNA, 19 bp, Artificial Sequence
  Description of Artificial Sequence: Synthetic oligonucleotide
gacagagagaagaaggcag

SEQ ID NO: 8711 - DNA, 19 bp, Artificial Sequence
  Description of Artificial Sequence: Synthetic oligonucleotide
ggacagagagaagaaggca

SEQ ID NO: 8712 - DNA, 19 bp, Artificial Sequence
  Description of Artificial Sequence: Synthetic oligonucleotide
gggacagagagaagaaggc

SEQ ID NO: 8713 - DNA, 19 bp, Artificial Sequence
  Description of Artificial Sequence: Synthetic oligonucleotide
ggggacagagagaagaagg

SEQ ID NO: 8714 - DNA, 19 bp, Artificial Sequence
  Description of Artificial Sequence: Synthetic oligonucleotide
aggggacagagagaagaag

SEQ ID NO: 8715 - DNA, 19 bp, Artificial Sequence
  Description of Artificial Sequence: Synthetic oligonucleotide
caggggacagagagaagaa

SEQ ID NO: 8716 - DNA, 19 bp, Artificial Sequence
  Description of Artificial Sequence: Synthetic oligonucleotide
tcaggggacagagagaaga

SEQ ID NO: 8717 - DNA, 19 bp, Artificial Sequence
  Description of Artificial Sequence: Synthetic oligonucleotide
gtcaggggacagagagaag

SEQ ID NO: 8718 - DNA, 19 bp, Artificial Sequence
  Description of Artificial Sequence: Synthetic oligonucleotide
agtcaggggacagagagaa

SEQ ID NO: 8719 - DNA, 19 bp, Artificial Sequence
  Description of Artificial Sequence: Synthetic oligonucleotide
gagtcaggggacagagaga

SEQ ID NO: 8720 - DNA, 19 bp, Artificial Sequence
  Description of Artificial Sequence: Synthetic oligonucleotide
ggagtcaggggacagagag

SEQ ID NO: 8721 - DNA, 19 bp, Artificial Sequence
  Description of Artificial Sequence: Synthetic oligonucleotide
aggagtcaggggacagaga

SEQ ID NO: 8722 - DNA, 19 bp, Artificial Sequence
  Description of Artificial Sequence: Synthetic oligonucleotide
caggagtcaggggacagag

SEQ ID NO: 8723 - DNA, 19 bp, Artificial Sequence
  Description of Artificial Sequence: Synthetic oligonucleotide
tcaggagtcaggggacaga

SEQ ID NO: 8724 - DNA, 19 bp, Artificial Sequence
  Description of Artificial Sequence: Synthetic oligonucleotide
gtcaggagtcaggggacag

SEQ ID NO: 8725 - DNA, 19 bp, Artificial Sequence
  Description of Artificial Sequence: Synthetic oligonucleotide
agtcaggagtcaggggaca

SEQ ID NO: 8726 - DNA, 19 bp, Artificial Sequence
  Description of Artificial Sequence: Synthetic oligonucleotide
cagtcaggagtcaggggac

SEQ ID NO: 8727 - DNA, 19 bp, Artificial Sequence
  Description of Artificial Sequence: Synthetic oligonucleotide
acagtcaggagtcagggga

SEQ ID NO: 8728 - DNA, 19 bp, Artificial Sequence
  Description of Artificial Sequence: Synthetic oligonucleotide
cacagtcaggagtcagggg

SEQ ID NO: 8729 - DNA, 19 bp, Artificial Sequence
  Description of Artificial Sequence: Synthetic oligonucleotide
acacagtcaggagtcaggg

SEQ ID NO: 8730 - DNA, 19 bp, Artificial Sequence
  Description of Artificial Sequence: Synthetic oligonucleotide
aacacagtcaggagtcagg

SEQ ID NO: 8731 - DNA, 19 bp, Artificial Sequence
  Description of Artificial Sequence: Synthetic oligonucleotide
aaacacagtcaggagtcag

SEQ ID NO: 8732 - DNA, 19 bp, Artificial Sequence
  Description of Artificial Sequence: Synthetic oligonucleotide
gaaacacagtcaggagtca

SEQ ID NO: 8733 - DNA, 19 bp, Artificial Sequence
  Description of Artificial Sequence: Synthetic oligonucleotide
agaaacacagtcaggagtc

SEQ ID NO: 8734 - DNA, 19 bp, Artificial Sequence
  Description of Artificial Sequence: Synthetic oligonucleotide
cagaaacacagtcaggagt

SEQ ID NO: 8735 - DNA, 19 bp, Artificial Sequence
  Description of Artificial Sequence: Synthetic oligonucleotide
tcagaaacacagtcaggag

SEQ ID NO: 8736 - DNA, 19 bp, Artificial Sequence
  Description of Artificial Sequence: Synthetic oligonucleotide
ctcagaaacacagtcagga

SEQ ID NO: 8737 - DNA, 19 bp, Artificial Sequence
  Description of Artificial Sequence: Synthetic oligonucleotide
gctcagaaacacagtcagg

SEQ ID NO: 8738 - DNA, 19 bp, Artificial Sequence
  Description of Artificial Sequence: Synthetic oligonucleotide
agctcagaaacacagtcag

SEQ ID NO: 8739 - DNA, 19 bp, Artificial Sequence
  Description of Artificial Sequence: Synthetic oligonucleotide
cagctcagaaacacagtca

SEQ ID NO: 8740 - DNA, 19 bp, Artificial Sequence
  Description of Artificial Sequence: Synthetic oligonucleotide
tcagctcagaaacacagtc

SEQ ID NO: 8741 - DNA, 19 bp, Artificial Sequence
  Description of Artificial Sequence: Synthetic oligonucleotide
ctcagctcagaaacacagt

SEQ ID NO: 8742 - DNA, 19 bp, Artificial Sequence
  Description of Artificial Sequence: Synthetic oligonucleotide
gctcagctcagaaacacag

SEQ ID NO: 8743 - DNA, 19 bp, Artificial Sequence
  Description of Artificial Sequence: Synthetic oligonucleotide
agctcagctcagaaacaca

SEQ ID NO: 8744 - DNA, 19 bp, Artificial Sequence
  Description of Artificial Sequence: Synthetic oligonucleotide
aagctcagctcagaaacac

SEQ ID NO: 8745 - DNA, 19 bp, Artificial Sequence
  Description of Artificial Sequence: Synthetic oligonucleotide
taagctcagctcagaaaca

SEQ ID NO: 8746 - DNA, 19 bp, Artificial Sequence
  Description of Artificial Sequence: Synthetic oligonucleotide
ttaagctcagctcagaaac

SEQ ID NO: 8747 - DNA, 19 bp, Artificial Sequence
  Description of Artificial Sequence: Synthetic oligonucleotide
tttaagctcagctcagaaa

SEQ ID NO: 8748 - DNA, 19 bp, Artificial Sequence
  Description of Artificial Sequence: Synthetic oligonucleotide
ttttaagctcagctcagaa

SEQ ID NO: 8749 - DNA, 19 bp, Artificial Sequence
  Description of Artificial Sequence: Synthetic oligonucleotide
cttttaagctcagctcaga

SEQ ID NO: 8750 - DNA, 19 bp, Artificial Sequence
  Description of Artificial Sequence: Synthetic oligonucleotide
tcttttaagctcagctcag

SEQ ID NO: 8751 - DNA, 19 bp, Artificial Sequence
  Description of Artificial Sequence: Synthetic oligonucleotide
atcttttaagctcagctca

SEQ ID NO: 8752 - DNA, 19 bp, Artificial Sequence
  Description of Artificial Sequence: Synthetic oligonucleotide
tatcttttaagctcagctc

SEQ ID NO: 8753 - DNA, 19 bp, Artificial Sequence
  Description of Artificial Sequence: Synthetic oligonucleotide
gtatcttttaagctcagct

SEQ ID NO: 8754 - DNA, 19 bp, Artificial Sequence
  Description of Artificial Sequence: Synthetic oligonucleotide
tgtatcttttaagctcagc

SEQ ID NO: 8755 - DNA, 19 bp, Artificial Sequence
  Description of Artificial Sequence: Synthetic oligonucleotide
ttgtatcttttaagctcag

SEQ ID NO: 8756 - DNA, 19 bp, Artificial Sequence
  Description of Artificial Sequence: Synthetic oligonucleotide
tttgtatcttttaagctca

SEQ ID NO: 8757 - DNA, 19 bp, Artificial Sequence
  Description of Artificial Sequence: Synthetic oligonucleotide
atttgtatcttttaagctc

SEQ ID NO: 8758 - DNA, 19 bp, Artificial Sequence
  Description of Artificial Sequence: Synthetic oligonucleotide
catttgtatcttttaagct

SEQ ID NO: 8759 - DNA, 19 bp, Artificial Sequence
  Description of Artificial Sequence: Synthetic oligonucleotide
tcatttgtatcttttaagc

SEQ ID NO: 8760 - DNA, 19 bp, Artificial Sequence
  Description of Artificial Sequence: Synthetic oligonucleotide
gtcatttgtatcttttaag

SEQ ID NO: 8761 - DNA, 19 bp, Artificial Sequence
  Description of Artificial Sequence: Synthetic oligonucleotide
tgtcatttgtatcttttaa

SEQ ID NO: 8762 - DNA, 19 bp, Artificial Sequence
  Description of Artificial Sequence: Synthetic oligonucleotide
ttgtcatttgtatctttta

SEQ ID NO: 8763 - DNA, 19 bp, Artificial Sequence
  Description of Artificial Sequence: Synthetic oligonucleotide
cttgtcatttgtatctttt

SEQ ID NO: 8764 - DNA, 19 bp, Artificial Sequence
  Description of Artificial Sequence: Synthetic oligonucleotide
gcttgtcatttgtatcttt

SEQ ID NO: 8765 - DNA, 19 bp, Artificial Sequence
  Description of Artificial Sequence: Synthetic oligonucleotide
agcttgtcatttgtatctt

SEQ ID NO: 8766 - DNA, 19 bp, Artificial Sequence
  Description of Artificial Sequence: Synthetic oligonucleotide
cagcttgtcatttgtatct

SEQ ID NO: 8767 - DNA, 19 bp, Artificial Sequence
  Description of Artificial Sequence: Synthetic oligonucleotide
gcagcttgtcatttgtatc

SEQ ID NO: 8768 - DNA, 19 bp, Artificial Sequence
  Description of Artificial Sequence: Synthetic oligonucleotide
tgcagcttgtcatttgtat

SEQ ID NO: 8769 - DNA, 19 bp, Artificial Sequence
  Description of Artificial Sequence: Synthetic oligonucleotide
ctgcagcttgtcatttgta

SEQ ID NO: 8770 - DNA, 19 bp, Artificial Sequence
  Description of Artificial Sequence: Synthetic oligonucleotide
gctgcagcttgtcatttgt

SEQ ID NO: 8771 - DNA, 19 bp, Artificial Sequence
  Description of Artificial Sequence: Synthetic oligonucleotide
agctgcagcttgtcatttg

SEQ ID NO: 8772 - DNA, 19 bp, Artificial Sequence
  Description of Artificial Sequence: Synthetic oligonucleotide
gagctgcagcttgtcattt

SEQ ID NO: 8773 - DNA, 19 bp, Artificial Sequence
  Description of Artificial Sequence: Synthetic oligonucleotide
agagctgcagcttgtcatt

SEQ ID NO: 8774 - DNA, 19 bp, Artificial Sequence
  Description of Artificial Sequence: Synthetic oligonucleotide
gagagctgcagcttgtcat

SEQ ID NO: 8775 - DNA, 19 bp, Artificial Sequence
  Description of Artificial Sequence: Synthetic oligonucleotide
agagagctgcagcttgtca

SEQ ID NO: 8776 - DNA, 19 bp, Artificial Sequence
  Description of Artificial Sequence: Synthetic oligonucleotide
gagagagctgcagcttgtc

SEQ ID NO: 8777 - DNA, 19 bp, Artificial Sequence
  Description of Artificial Sequence: Synthetic oligonucleotide
agagagagctgcagcttgt

SEQ ID NO: 8778 - DNA, 19 bp, Artificial Sequence
  Description of Artificial Sequence: Synthetic oligonucleotide
cagagagagctgcagcttg

SEQ ID NO: 8779 - DNA, 19 bp, Artificial Sequence
  Description of Artificial Sequence: Synthetic oligonucleotide
gcagagagagctgcagctt

SEQ ID NO: 8780 - DNA, 19 bp, Artificial Sequence
  Description of Artificial Sequence: Synthetic oligonucleotide
ggcagagagagctgcagct

SEQ ID NO: 8781 - DNA, 19 bp, Artificial Sequence
  Description of Artificial Sequence: Synthetic oligonucleotide
tggcagagagagctgcagc

SEQ ID NO: 8782 - DNA, 19 bp, Artificial Sequence
  Description of Artificial Sequence: Synthetic oligonucleotide
atggcagagagagctgcag

SEQ ID NO: 8783 - DNA, 19 bp, Artificial Sequence
  Description of Artificial Sequence: Synthetic oligonucleotide
aatggcagagagagctgca

SEQ ID NO: 8784 - DNA, 19 bp, Artificial Sequence
  Description of Artificial Sequence: Synthetic oligonucleotide
caatggcagagagagctgc

SEQ ID NO: 8785 - DNA, 19 bp, Artificial Sequence
  Description of Artificial Sequence: Synthetic oligonucleotide
gcaatggcagagagagctg

SEQ ID NO: 8786 - DNA, 19 bp, Artificial Sequence
  Description of Artificial Sequence: Synthetic oligonucleotide
agcaatggcagagagagct

SEQ ID NO: 8787 - DNA, 19 bp, Artificial Sequence
  Description of Artificial Sequence: Synthetic oligonucleotide
aagcaatggcagagagagc

SEQ ID NO: 8788 - DNA, 19 bp, Artificial Sequence
  Description of Artificial Sequence: Synthetic oligonucleotide
gaagcaatggcagagagag

SEQ ID NO: 8789 - DNA, 19 bp, Artificial Sequence
  Description of Artificial Sequence: Synthetic oligonucleotide
agaagcaatggcagagaga

SEQ ID NO: 8790 - DNA, 19 bp, Artificial Sequence
  Description of Artificial Sequence: Synthetic oligonucleotide
gagaagcaatggcagagag

SEQ ID NO: 8791 - DNA, 19 bp, Artificial Sequence
  Description of Artificial Sequence: Synthetic oligonucleotide
agagaagcaatggcagaga

SEQ ID NO: 8792 - DNA, 19 bp, Artificial Sequence
  Description of Artificial Sequence: Synthetic oligonucleotide
aagagaagcaatggcagag

SEQ ID NO: 8793 - DNA, 19 bp, Artificial Sequence
  Description of Artificial Sequence: Synthetic oligonucleotide
aaagagaagcaatggcaga

SEQ ID NO: 8794 - DNA, 19 bp, Artificial Sequence
  Description of Artificial Sequence: Synthetic oligonucleotide
taaagagaagcaatggcag

SEQ ID NO: 8795 - DNA, 19 bp, Artificial Sequence
  Description of Artificial Sequence: Synthetic oligonucleotide
ataaagagaagcaatggca

SEQ ID NO: 8796 - DNA, 19 bp, Artificial Sequence
  Description of Artificial Sequence: Synthetic oligonucleotide
gataaagagaagcaatggc

SEQ ID NO: 8797 - DNA, 19 bp, Artificial Sequence
  Description of Artificial Sequence: Synthetic oligonucleotide
agataaagagaagcaatgg

SEQ ID NO: 8798 - DNA, 19 bp, Artificial Sequence
  Description of Artificial Sequence: Synthetic oligonucleotide
gagataaagagaagcaatg

SEQ ID NO: 8799 - DNA, 19 bp, Artificial Sequence
  Description of Artificial Sequence: Synthetic oligonucleotide
agagataaagagaagcaat

SEQ ID NO: 8800 - DNA, 19 bp, Artificial Sequence
  Description of Artificial Sequence: Synthetic oligonucleotide
gagagataaagagaagcaa

SEQ ID NO: 8801 - DNA, 19 bp, Artificial Sequence
  Description of Artificial Sequence: Synthetic oligonucleotide
ggagagataaagagaagca

SEQ ID NO: 8802 - DNA, 19 bp, Artificial Sequence
  Description of Artificial Sequence: Synthetic oligonucleotide
tggagagataaagagaagc

SEQ ID NO: 8803 - DNA, 19 bp, Artificial Sequence
  Description of Artificial Sequence: Synthetic oligonucleotide
ttggagagataaagagaag

SEQ ID NO: 8804 - DNA, 19 bp, Artificial Sequence
  Description of Artificial Sequence: Synthetic oligonucleotide
tttggagagataaagagaa

SEQ ID NO: 8805 - DNA, 19 bp, Artificial Sequence
  Description of Artificial Sequence: Synthetic oligonucleotide
atttggagagataaagaga

SEQ ID NO: 8806 - DNA, 19 bp, Artificial Sequence
  Description of Artificial Sequence: Synthetic oligonucleotide
gatttggagagataaagag

SEQ ID NO: 8807 - DNA, 19 bp, Artificial Sequence
  Description of Artificial Sequence: Synthetic oligonucleotide
ggatttggagagataaaga

SEQ ID NO: 8808 - DNA, 19 bp, Artificial Sequence
  Description of Artificial Sequence: Synthetic oligonucleotide
gggatttggagagataaag

SEQ ID NO: 8809 - DNA, 19 bp, Artificial Sequence
  Description of Artificial Sequence: Synthetic oligonucleotide
agggatttggagagataaa

SEQ ID NO: 8810 - DNA, 19 bp, Artificial Sequence
  Description of Artificial Sequence: Synthetic oligonucleotide
aagggatttggagagataa

SEQ ID NO: 8811 - DNA, 19 bp, Artificial Sequence
  Description of Artificial Sequence: Synthetic oligonucleotide
gaagggatttggagagata

SEQ ID NO: 8812 - DNA, 19 bp, Artificial Sequence
  Description of Artificial Sequence: Synthetic oligonucleotide
ggaagggatttggagagat

SEQ ID NO: 8813 - DNA, 19 bp, Artificial Sequence
  Description of Artificial Sequence: Synthetic oligonucleotide
tggaagggatttggagaga

SEQ ID NO: 8814 - DNA, 19 bp, Artificial Sequence
  Description of Artificial Sequence: Synthetic oligonucleotide
gtggaagggatttggagag

SEQ ID NO: 8815 - DNA, 19 bp, Artificial Sequence
  Description of Artificial Sequence: Synthetic oligonucleotide
tgtggaagggatttggaga

SEQ ID NO: 8816 - DNA, 19 bp, Artificial Sequence
  Description of Artificial Sequence: Synthetic oligonucleotide
gtgtggaagggatttggag

SEQ ID NO: 8817 - DNA, 19 bp, Artificial Sequence
  Description of Artificial Sequence: Synthetic oligonucleotide
agtgtggaagggatttgga

SEQ ID NO: 8818 - DNA, 19 bp, Artificial Sequence
  Description of Artificial Sequence: Synthetic oligonucleotide
gagtgtggaagggatttgg

SEQ ID NO: 8819 - DNA, 19 bp, Artificial Sequence
  Description of Artificial Sequence: Synthetic oligonucleotide
cgagtgtggaagggatttg

SEQ ID NO: 8820 - DNA, 19 bp, Artificial Sequence
  Description of Artificial Sequence: Synthetic oligonucleotide
tcgagtgtggaagggattt

SEQ ID NO: 8821 - DNA, 19 bp, Artificial Sequence
  Description of Artificial Sequence: Synthetic oligonucleotide
ctcgagtgtggaagggatt

SEQ ID NO: 8822 - DNA, 19 bp, Artificial Sequence
  Description of Artificial Sequence: Synthetic oligonucleotide
cctcgagtgtggaagggat

SEQ ID NO: 8823 - DNA, 19 bp, Artificial Sequence
  Description of Artificial Sequence: Synthetic oligonucleotide
acctcgagtgtggaaggga

SEQ ID NO: 8824 - DNA, 19 bp, Artificial Sequence
  Description of Artificial Sequence: Synthetic oligonucleotide
aacctcgagtgtggaaggg

SEQ ID NO: 8825 - DNA, 19 bp, Artificial Sequence
  Description of Artificial Sequence: Synthetic oligonucleotide
aaacctcgagtgtggaagg

SEQ ID NO: 8826 - DNA, 19 bp, Artificial Sequence
  Description of Artificial Sequence: Synthetic oligonucleotide
aaaacctcgagtgtggaag

SEQ ID NO: 8827 - DNA, 19 bp, Artificial Sequence
  Description of Artificial Sequence: Synthetic oligonucleotide
gaaaacctcgagtgtggaa

SEQ ID NO: 8828 - DNA, 19 bp, Artificial Sequence
  Description of Artificial Sequence: Synthetic oligonucleotide
cgaaaacctcgagtgtgga

SEQ ID NO: 8829 - DNA, 19 bp, Artificial Sequence
  Description of Artificial Sequence: Synthetic oligonucleotide
tcgaaaacctcgagtgtgg

SEQ ID NO: 8830 - DNA, 19 bp, Artificial Sequence
  Description of Artificial Sequence: Synthetic oligonucleotide
gtcgaaaacctcgagtgtg

SEQ ID NO: 8831 - DNA, 19 bp, Artificial Sequence
  Description of Artificial Sequence: Synthetic oligonucleotide
tgtcgaaaacctcgagtgt

SEQ ID NO: 8832 - DNA, 19 bp, Artificial Sequence
  Description of Artificial Sequence: Synthetic oligonucleotide
gtgtcgaaaacctcgagtg

SEQ ID NO: 8833 - DNA, 19 bp, Artificial Sequence
  Description of Artificial Sequence: Synthetic oligonucleotide
agtgtcgaaaacctcgagt

SEQ ID NO: 8834 - DNA, 19 bp, Artificial Sequence
  Description of Artificial Sequence: Synthetic oligonucleotide
cagtgtcgaaaacctcgag

SEQ ID NO: 8835 - DNA, 19 bp, Artificial Sequence
  Description of Artificial Sequence: Synthetic oligonucleotide
ccagtgtcgaaaacctcga

SEQ ID NO: 8836 - DNA, 19 bp, Artificial Sequence
  Description of Artificial Sequence: Synthetic oligonucleotide
tccagtgtcgaaaacctcg

SEQ ID NO: 8837 - DNA, 19 bp, Artificial Sequence
  Description of Artificial Sequence: Synthetic oligonucleotide
ttccagtgtcgaaaacctc

SEQ ID NO: 8838 - DNA, 19 bp, Artificial Sequence
  Description of Artificial Sequence: Synthetic oligonucleotide
gttccagtgtcgaaaacct

SEQ ID NO: 8839 - DNA, 19 bp, Artificial Sequence
  Description of Artificial Sequence: Synthetic oligonucleotide
ggttccagtgtcgaaaacc

SEQ ID NO: 8840 - DNA, 19 bp, Artificial Sequence
  Description of Artificial Sequence: Synthetic oligonucleotide
gggttccagtgtcgaaaac

SEQ ID NO: 8841 - DNA, 19 bp, Artificial Sequence
  Description of Artificial Sequence: Synthetic oligonucleotide
tgggttccagtgtcgaaaa

SEQ ID NO: 8842 - DNA, 19 bp, Artificial Sequence
  Description of Artificial Sequence: Synthetic oligonucleotide
ctgggttccagtgtcgaaa

SEQ ID NO: 8843 - DNA, 19 bp, Artificial Sequence
  Description of Artificial Sequence: Synthetic oligonucleotide
actgggttccagtgtcgaa

SEQ ID NO: 8844 - DNA, 19 bp, Artificial Sequence
  Description of Artificial Sequence: Synthetic oligonucleotide
cactgggttccagtgtcga

SEQ ID NO: 8845 - DNA, 19 bp, Artificial Sequence
  Description of Artificial Sequence: Synthetic oligonucleotide
gcactgggttccagtgtcg

SEQ ID NO: 8846 - DNA, 19 bp, Artificial Sequence
  Description of Artificial Sequence: Synthetic oligonucleotide
tgcactgggttccagtgtc

SEQ ID NO: 8847 - DNA, 19 bp, Artificial Sequence
  Description of Artificial Sequence: Synthetic oligonucleotide
ctgcactgggttccagtgt

SEQ ID NO: 8848 - DNA, 19 bp, Artificial Sequence
  Description of Artificial Sequence: Synthetic oligonucleotide
gctgcactgggttccagtg

SEQ ID NO: 8849 - DNA, 19 bp, Artificial Sequence
  Description of Artificial Sequence: Synthetic oligonucleotide
cgctgcactgggttccagt

SEQ ID NO: 8850 - DNA, 19 bp, Artificial Sequence
  Description of Artificial Sequence: Synthetic oligonucleotide
acgctgcactgggttccag

SEQ ID NO: 8851 - DNA, 19 bp, Artificial Sequence
  Description of Artificial Sequence: Synthetic oligonucleotide
aacgctgcactgggttcca

SEQ ID NO: 8852 - DNA, 19 bp, Artificial Sequence
  Description of Artificial Sequence: Synthetic oligonucleotide
caacgctgcactgggttcc

SEQ ID NO: 8853 - DNA, 19 bp, Artificial Sequence
  Description of Artificial Sequence: Synthetic oligonucleotide
ccaacgctgcactgggttc

SEQ ID NO: 8854 - DNA, 19 bp, Artificial Sequence
  Description of Artificial Sequence: Synthetic oligonucleotide
gccaacgctgcactgggtt

SEQ ID NO: 8855 - DNA, 19 bp, Artificial Sequence
  Description of Artificial Sequence: Synthetic oligonucleotide
agccaacgctgcactgggt

SEQ ID NO: 8856 - DNA, 19 bp, Artificial Sequence
  Description of Artificial Sequence: Synthetic oligonucleotide
aagccaacgctgcactggg

SEQ ID NO: 8857 - DNA, 19 bp, Artificial Sequence
  Description of Artificial Sequence: Synthetic oligonucleotide
caagccaacgctgcactgg

SEQ ID NO: 8858 - DNA, 19 bp, Artificial Sequence
  Description of Artificial Sequence: Synthetic oligonucleotide
ccaagccaacgctgcactg

SEQ ID NO: 8859 - DNA, 19 bp, Artificial Sequence
  Description of Artificial Sequence: Synthetic oligonucleotide
cccaagccaacgctgcact

SEQ ID NO: 8860 - DNA, 19 bp, Artificial Sequence
  Description of Artificial Sequence: Synthetic oligonucleotide
tcccaagccaacgctgcac

SEQ ID NO: 8861 - DNA, 19 bp, Artificial Sequence
  Description of Artificial Sequence: Synthetic oligonucleotide
gtcccaagccaacgctgca

SEQ ID NO: 8862 - DNA, 19 bp, Artificial Sequence
  Description of Artificial Sequence: Synthetic oligonucleotide
ggtcccaagccaacgctgc

SEQ ID NO: 8863 - DNA, 19 bp, Artificial Sequence
  Description of Artificial Sequence: Synthetic oligonucleotide
cggtcccaagccaacgctg

SEQ ID NO: 8864 - DNA, 19 bp, Artificial Sequence
  Description of Artificial Sequence: Synthetic oligonucleotide
gcggtcccaagccaacgct

SEQ ID NO: 8865 - DNA, 19 bp, Artificial Sequence
  Description of Artificial Sequence: Synthetic oligonucleotide
ggcggtcccaagccaacgc

SEQ ID NO: 8866 - DNA, 19 bp, Artificial Sequence
  Description of Artificial Sequence: Synthetic oligonucleotide
tggcggtcccaagccaacg

SEQ ID NO: 8867 - DNA, 19 bp, Artificial Sequence
  Description of Artificial Sequence: Synthetic oligonucleotide
atggcggtcccaagccaac

SEQ ID NO: 8868 - DNA, 19 bp, Artificial Sequence
  Description of Artificial Sequence: Synthetic oligonucleotide
catggcggtcccaagccaa

SEQ ID NO: 8869 - DNA, 19 bp, Artificial Sequence
  Description of Artificial Sequence: Synthetic oligonucleotide
tcatggcggtcccaagcca

SEQ ID NO: 8870 - DNA, 19 bp, Artificial Sequence
  Description of Artificial Sequence: Synthetic oligonucleotide
ttcatggcggtcccaagcc

SEQ ID NO: 8871 - DNA, 19 bp, Artificial Sequence
  Description of Artificial Sequence: Synthetic oligonucleotide
cttcatggcggtcccaagc

SEQ ID NO: 8872 - DNA, 19 bp, Artificial Sequence
  Description of Artificial Sequence: Synthetic oligonucleotide
tcttcatggcggtcccaag

SEQ ID NO: 8873 - DNA, 19 bp, Artificial Sequence
  Description of Artificial Sequence: Synthetic oligonucleotide
gtcttcatggcggtcccaa

SEQ ID NO: 8874 - DNA, 19 bp, Artificial Sequence
  Description of Artificial Sequence: Synthetic oligonucleotide
ggtcttcatggcggtccca

SEQ ID NO: 8875 - DNA, 19 bp, Artificial Sequence
  Description of Artificial Sequence: Synthetic oligonucleotide
gggtcttcatggcggtccc

SEQ ID NO: 8876 - DNA, 19 bp, Artificial Sequence
  Description of Artificial Sequence: Synthetic oligonucleotide
ggggtcttcatggcggtcc

SEQ ID NO: 8877 - DNA, 19 bp, Artificial Sequence
  Description of Artificial Sequence: Synthetic oligonucleotide
tggggtcttcatggcggtc

SEQ ID NO: 8878 - DNA, 19 bp, Artificial Sequence
  Description of Artificial Sequence: Synthetic oligonucleotide
atggggtcttcatggcggt

SEQ ID NO: 8879 - DNA, 19 bp, Artificial Sequence
  Description of Artificial Sequence: Synthetic oligonucleotide
catggggtcttcatggcgg

SEQ ID NO: 8880 - DNA, 19 bp, Artificial Sequence
  Description of Artificial Sequence: Synthetic oligonucleotide
acatggggtcttcatggcg

SEQ ID NO: 8881 - DNA, 19 bp, Artificial Sequence
  Description of Artificial Sequence: Synthetic oligonucleotide
aacatggggtcttcatggc

SEQ ID NO: 8882 - DNA, 19 bp, Artificial Sequence
  Description of Artificial Sequence: Synthetic oligonucleotide
aaacatggggtcttcatgg

SEQ ID NO: 8883 - DNA, 19 bp, Artificial Sequence
  Description of Artificial Sequence: Synthetic oligonucleotide
caaacatggggtcttcatg

SEQ ID NO: 8884 - DNA, 19 bp, Artificial Sequence
  Description of Artificial Sequence: Synthetic oligonucleotide
gcaaacatggggtcttcat

SEQ ID NO: 8885 - DNA, 19 bp, Artificial Sequence
  Description of Artificial Sequence: Synthetic oligonucleotide
cgcaaacatggggtcttca

SEQ ID NO: 8886 - DNA, 19 bp, Artificial Sequence
  Description of Artificial Sequence: Synthetic oligonucleotide
tcgcaaacatggggtcttc

SEQ ID NO: 8887 - DNA, 19 bp, Artificial Sequence
  Description of Artificial Sequence: Synthetic oligonucleotide
gtcgcaaacatggggtctt

SEQ ID NO: 8888 - DNA, 19 bp, Artificial Sequence
  Description of Artificial Sequence: Synthetic oligonucleotide
tgtcgcaaacatggggtct

SEQ ID NO: 8889 - DNA, 19 bp, Artificial Sequence
  Description of Artificial Sequence: Synthetic oligonucleotide
ctgtcgcaaacatggggtc

SEQ ID NO: 8890 - DNA, 19 bp, Artificial Sequence
  Description of Artificial Sequence: Synthetic oligonucleotide
cctgtcgcaaacatggggt

SEQ ID NO: 8891 - DNA, 19 bp, Artificial Sequence
  Description of Artificial Sequence: Synthetic oligonucleotide
tcctgtcgcaaacatgggg

SEQ ID NO: 8892 - DNA, 19 bp, Artificial Sequence
  Description of Artificial Sequence: Synthetic oligonucleotide
ctcctgtcgcaaacatggg

SEQ ID NO: 8893 - DNA, 19 bp, Artificial Sequence
  Description of Artificial Sequence: Synthetic oligonucleotide
tctcctgtcgcaaacatgg

SEQ ID NO: 8894 - DNA, 19 bp, Artificial Sequence
  Description of Artificial Sequence: Synthetic oligonucleotide
ctctcctgtcgcaaacatg

SEQ ID NO: 8895 - DNA, 19 bp, Artificial Sequence
  Description of Artificial Sequence: Synthetic oligonucleotide
gctctcctgtcgcaaacat

SEQ ID NO: 8896 - DNA, 19 bp, Artificial Sequence
  Description of Artificial Sequence: Synthetic oligonucleotide
ggctctcctgtcgcaaaca

SEQ ID NO: 8897 - DNA, 19 bp, Artificial Sequence
  Description of Artificial Sequence: Synthetic oligonucleotide
aggctctcctgtcgcaaac

SEQ ID NO: 8898 - DNA, 19 bp, Artificial Sequence
  Description of Artificial Sequence: Synthetic oligonucleotide
caggctctcctgtcgcaaa

SEQ ID NO: 8899 - DNA, 19 bp, Artificial Sequence
  Description of Artificial Sequence: Synthetic oligonucleotide
ccaggctctcctgtcgcaa

SEQ ID NO: 8900 - DNA, 19 bp, Artificial Sequence
  Description of Artificial Sequence: Synthetic oligonucleotide
cccaggctctcctgtcgca

SEQ ID NO: 8901 - DNA, 19 bp, Artificial Sequence
  Description of Artificial Sequence: Synthetic oligonucleotide
acccaggctctcctgtcgc

SEQ ID NO: 8902 - DNA, 19 bp, Artificial Sequence
  Description of Artificial Sequence: Synthetic oligonucleotide
aacccaggctctcctgtcg

SEQ ID NO: 8903 - DNA, 19 bp, Artificial Sequence
  Description of Artificial Sequence: Synthetic oligonucleotide
caacccaggctctcctgtc

SEQ ID NO: 8904 - DNA, 19 bp, Artificial Sequence
  Description of Artificial Sequence: Synthetic oligonucleotide
ccaacccaggctctcctgt

SEQ ID NO: 8905 - DNA, 19 bp, Artificial Sequence
  Description of Artificial Sequence: Synthetic oligonucleotide
accaacccaggctctcctg

SEQ ID NO: 8906 - DNA, 19 bp, Artificial Sequence
  Description of Artificial Sequence: Synthetic oligonucleotide
caccaacccaggctctcct

SEQ ID NO: 8907 - DNA, 19 bp, Artificial Sequence
  Description of Artificial Sequence: Synthetic oligonucleotide
acaccaacccaggctctcc

SEQ ID NO: 8908 - DNA, 19 bp, Artificial Sequence
  Description of Artificial Sequence: Synthetic oligonucleotide
aacaccaacccaggctctc

SEQ ID NO: 8909 - DNA, 19 bp, Artificial Sequence
  Description of Artificial Sequence: Synthetic oligonucleotide
caacaccaacccaggctct

SEQ ID NO: 8910 - DNA, 19 bp, Artificial Sequence
  Description of Artificial Sequence: Synthetic oligonucleotide
tcaacaccaacccaggctc

SEQ ID NO: 8911 - DNA, 19 bp, Artificial Sequence
  Description of Artificial Sequence: Synthetic oligonucleotide
ctcaacaccaacccaggct

SEQ ID NO: 8912 - DNA, 19 bp, Artificial Sequence
  Description of Artificial Sequence: Synthetic oligonucleotide
actcaacaccaacccaggc

SEQ ID NO: 8913 - DNA, 19 bp, Artificial Sequence
  Description of Artificial Sequence: Synthetic oligonucleotide
tactcaacaccaacccagg

SEQ ID NO: 8914 - DNA, 19 bp, Artificial Sequence
  Description of Artificial Sequence: Synthetic oligonucleotide
gtactcaacaccaacccag

SEQ ID NO: 8915 - DNA, 19 bp, Artificial Sequence
  Description of Artificial Sequence: Synthetic oligonucleotide
tgtactcaacaccaaccca

SEQ ID NO: 8916 - DNA, 19 bp, Artificial Sequence
  Description of Artificial Sequence: Synthetic oligonucleotide
atgtactcaacaccaaccc

SEQ ID NO: 8917 - DNA, 19 bp, Artificial Sequence
  Description of Artificial Sequence: Synthetic oligonucleotide
tatgtactcaacaccaacc

SEQ ID NO: 8918 - DNA, 19 bp, Artificial Sequence
  Description of Artificial Sequence: Synthetic oligonucleotide
ttatgtactcaacaccaac

SEQ ID NO: 8919 - DNA, 19 bp, Artificial Sequence
  Description of Artificial Sequence: Synthetic oligonucleotide
cttatgtactcaacaccaa

SEQ ID NO: 8920 - DNA, 19 bp, Artificial Sequence
  Description of Artificial Sequence: Synthetic oligonucleotide
tcttatgtactcaacacca

SEQ ID NO: 8921 - DNA, 19 bp, Artificial Sequence
  Description of Artificial Sequence: Synthetic oligonucleotide
ctcttatgtactcaacacc

SEQ ID NO: 8922 - DNA, 19 bp, Artificial Sequence
  Description of Artificial Sequence: Synthetic oligonucleotide
tctcttatgtactcaacac

SEQ ID NO: 8923 - DNA, 19 bp, Artificial Sequence
  Description of Artificial Sequence: Synthetic oligonucleotide
gtctcttatgtactcaaca

SEQ ID NO: 8924 - DNA, 19 bp, Artificial Sequence
  Description of Artificial Sequence: Synthetic oligonucleotide
cgtctcttatgtactcaac

SEQ ID NO: 8925 - DNA, 19 bp, Artificial Sequence
  Description of Artificial Sequence: Synthetic oligonucleotide
tcgtctcttatgtactcaa

SEQ ID NO: 8926 - DNA, 19 bp, Artificial Sequence
  Description of Artificial Sequence: Synthetic oligonucleotide
ctcgtctcttatgtactca

SEQ ID NO: 8927 - DNA, 19 bp, Artificial Sequence
  Description of Artificial Sequence: Synthetic oligonucleotide
cctcgtctcttatgtactc

SEQ ID NO: 8928 - DNA, 19 bp, Artificial Sequence
  Description of Artificial Sequence: Synthetic oligonucleotide
gcctcgtctcttatgtact

SEQ ID NO: 8929 - DNA, 19 bp, Artificial Sequence
  Description of Artificial Sequence: Synthetic oligonucleotide
tgcctcgtctcttatgtac

SEQ ID NO: 8930 - DNA, 19 bp, Artificial Sequence
  Description of Artificial Sequence: Synthetic oligonucleotide
ttgcctcgtctcttatgta

SEQ ID NO: 8931 - DNA, 19 bp, Artificial Sequence
  Description of Artificial Sequence: Synthetic oligonucleotide
cttgcctcgtctcttatgt

SEQ ID NO: 8932 - DNA, 19 bp, Artificial Sequence
  Description of Artificial Sequence: Synthetic oligonucleotide
ccttgcctcgtctcttatg

SEQ ID NO: 8933 - DNA, 19 bp, Artificial Sequence
  Description of Artificial Sequence: Synthetic oligonucleotide
accttgcctcgtctcttat

SEQ ID NO: 8934 - DNA, 19 bp, Artificial Sequence
  Description of Artificial Sequence: Synthetic oligonucleotide
aaccttgcctcgtctctta

SEQ ID NO: 8935 - DNA, 19 bp, Artificial Sequence
  Description of Artificial Sequence: Synthetic oligonucleotide
gaaccttgcctcgtctctt

SEQ ID NO: 8936 - DNA, 19 bp, Artificial Sequence
  Description of Artificial Sequence: Synthetic oligonucleotide
tgaaccttgcctcgtctct

SEQ ID NO: 8937 - DNA, 19 bp, Artificial Sequence
  Description of Artificial Sequence: Synthetic oligonucleotide
ctgaaccttgcctcgtctc

SEQ ID NO: 8938 - DNA, 19 bp, Artificial Sequence
  Description of Artificial Sequence: Synthetic oligonucleotide
gctgaaccttgcctcgtct

SEQ ID NO: 8939 - DNA, 19 bp, Artificial Sequence
  Description of Artificial Sequence: Synthetic oligonucleotide
agctgaaccttgcctcgtc

SEQ ID NO: 8940 - DNA, 19 bp, Artificial Sequence
  Description of Artificial Sequence: Synthetic oligonucleotide
tagctgaaccttgcctcgt

SEQ ID NO: 8941 - DNA, 19 bp, Artificial Sequence
  Description of Artificial Sequence: Synthetic oligonucleotide
ttagctgaaccttgcctcg

SEQ ID NO: 8942 - DNA, 19 bp, Artificial Sequence
  Description of Artificial Sequence: Synthetic oligonucleotide
cttagctgaaccttgcctc

SEQ ID NO: 8943 - DNA, 19 bp, Artificial Sequence
  Description of Artificial Sequence: Synthetic oligonucleotide
acttagctgaaccttgcct

SEQ ID NO: 8944 - DNA, 19 bp, Artificial Sequence
  Description of Artificial Sequence: Synthetic oligonucleotide
gacttagctgaaccttgcc

SEQ ID NO: 8945 - DNA, 19 bp, Artificial Sequence
  Description of Artificial Sequence: Synthetic oligonucleotide
agacttagctgaaccttgc

SEQ ID NO: 8946 - DNA, 19 bp, Artificial Sequence
  Description of Artificial Sequence: Synthetic oligonucleotide
aagacttagctgaaccttg

SEQ ID NO: 8947 - DNA, 19 bp, Artificial Sequence
  Description of Artificial Sequence: Synthetic oligonucleotide
aaagacttagctgaacctt

SEQ ID NO: 8948 - DNA, 19 bp, Artificial Sequence
  Description of Artificial Sequence: Synthetic oligonucleotide
caaagacttagctgaacct

SEQ ID NO: 8949 - DNA, 19 bp, Artificial Sequence
  Description of Artificial Sequence: Synthetic oligonucleotide
acaaagacttagctgaacc

SEQ ID NO: 8950 - DNA, 19 bp, Artificial Sequence
  Description of Artificial Sequence: Synthetic oligonucleotide
gacaaagacttagctgaac

SEQ ID NO: 8951 - DNA, 19 bp, Artificial Sequence
  Description of Artificial Sequence: Synthetic oligonucleotide
ggacaaagacttagctgaa

SEQ ID NO: 8952 - DNA, 19 bp, Artificial Sequence
  Description of Artificial Sequence: Synthetic oligonucleotide
gggacaaagacttagctga

SEQ ID NO: 8953 - DNA, 19 bp, Artificial Sequence
  Description of Artificial Sequence: Synthetic oligonucleotide
tgggacaaagacttagctg

SEQ ID NO: 8954 - DNA, 19 bp, Artificial Sequence
  Description of Artificial Sequence: Synthetic oligonucleotide
ctgggacaaagacttagct

SEQ ID NO: 8955 - DNA, 19 bp, Artificial Sequence
  Description of Artificial Sequence: Synthetic oligonucleotide
gctgggacaaagacttagc

SEQ ID NO: 8956 - DNA, 19 bp, Artificial Sequence
  Description of Artificial Sequence: Synthetic oligonucleotide
ggctgggacaaagacttag

SEQ ID NO: 8957 - DNA, 19 bp, Artificial Sequence
  Description of Artificial Sequence: Synthetic oligonucleotide
aggctgggacaaagactta

SEQ ID NO: 8958 - DNA, 19 bp, Artificial Sequence
  Description of Artificial Sequence: Synthetic oligonucleotide
aaggctgggacaaagactt

SEQ ID NO: 8959 - DNA, 19 bp, Artificial Sequence
  Description of Artificial Sequence: Synthetic oligonucleotide
taaggctgggacaaagact

SEQ ID NO: 8960 - DNA, 19 bp, Artificial Sequence
  Description of Artificial Sequence: Synthetic oligonucleotide
ttaaggctgggacaaagac

SEQ ID NO: 8961 - DNA, 19 bp, Artificial Sequence
  Description of Artificial Sequence: Synthetic oligonucleotide
attaaggctgggacaaaga

SEQ ID NO: 8962 - DNA, 19 bp, Artificial Sequence
  Description of Artificial Sequence: Synthetic oligonucleotide
cattaaggctgggacaaag

SEQ ID NO: 8963 - DNA, 19 bp, Artificial Sequence
  Description of Artificial Sequence: Synthetic oligonucleotide
gcattaaggctgggacaaa

SEQ ID NO: 8964 - DNA, 19 bp, Artificial Sequence
  Description of Artificial Sequence: Synthetic oligonucleotide
agcattaaggctgggacaa

SEQ ID NO: 8965 - DNA, 19 bp, Artificial Sequence
  Description of Artificial Sequence: Synthetic oligonucleotide
tagcattaaggctgggaca

SEQ ID NO: 8966 - DNA, 19 bp, Artificial Sequence
  Description of Artificial Sequence: Synthetic oligonucleotide
ttagcattaaggctgggac

SEQ ID NO: 8967 - DNA, 19 bp, Artificial Sequence
  Description of Artificial Sequence: Synthetic oligonucleotide
gttagcattaaggctggga

SEQ ID NO: 8968 - DNA, 19 bp, Artificial Sequence
  Description of Artificial Sequence: Synthetic oligonucleotide
ggttagcattaaggctggg

SEQ ID NO: 8969 - DNA, 19 bp, Artificial Sequence
  Description of Artificial Sequence: Synthetic oligonucleotide
tggttagcattaaggctgg

SEQ ID NO: 8970 - DNA, 19 bp, Artificial Sequence
  Description of Artificial Sequence: Synthetic oligonucleotide
ttggttagcattaaggctg

SEQ ID NO: 8971 - DNA, 19 bp, Artificial Sequence
  Description of Artificial Sequence: Synthetic oligonucleotide
gttggttagcattaaggct

SEQ ID NO: 8972 - DNA, 19 bp, Artificial Sequence
  Description of Artificial Sequence: Synthetic oligonucleotide
tgttggttagcattaaggc

SEQ ID NO: 8973 - DNA, 19 bp, Artificial Sequence
  Description of Artificial Sequence: Synthetic oligonucleotide
gtgttggttagcattaagg

SEQ ID NO: 8974 - DNA, 19 bp, Artificial Sequence
  Description of Artificial Sequence: Synthetic oligonucleotide
agtgttggttagcattaag

SEQ ID NO: 8975 - DNA, 19 bp, Artificial Sequence
  Description of Artificial Sequence: Synthetic oligonucleotide
aagtgttggttagcattaa

SEQ ID NO: 8976 - DNA, 19 bp, Artificial Sequence
  Description of Artificial Sequence: Synthetic oligonucleotide
aaagtgttggttagcatta

SEQ ID NO: 8977 - DNA, 19 bp, Artificial Sequence
  Description of Artificial Sequence: Synthetic oligonucleotide
gaaagtgttggttagcatt

SEQ ID NO: 8978 - DNA, 19 bp, Artificial Sequence
  Description of Artificial Sequence: Synthetic oligonucleotide
tgaaagtgttggttagcat

SEQ ID NO: 8979 - DNA, 19 bp, Artificial Sequence
  Description of Artificial Sequence: Synthetic oligonucleotide
ctgaaagtgttggttagca

SEQ ID NO: 8980 - DNA, 19 bp, Artificial Sequence
  Description of Artificial Sequence: Synthetic oligonucleotide
tctgaaagtgttggttagc

SEQ ID NO: 8981 - DNA, 19 bp, Artificial Sequence
  Description of Artificial Sequence: Synthetic oligonucleotide
ttctgaaagtgttggttag

SEQ ID NO: 8982 - DNA, 19 bp, Artificial Sequence
  Description of Artificial Sequence: Synthetic oligonucleotide
tttctgaaagtgttggtta

SEQ ID NO: 8983 - DNA, 19 bp, Artificial Sequence
  Description of Artificial Sequence: Synthetic oligonucleotide
atttctgaaagtgttggtt

SEQ ID NO: 8984 - DNA, 19 bp, Artificial Sequence
  Description of Artificial Sequence: Synthetic oligonucleotide
catttctgaaagtgttggt

SEQ ID NO: 8985 - DNA, 19 bp, Artificial Sequence
  Description of Artificial Sequence: Synthetic oligonucleotide
acatttctgaaagtgttgg

SEQ ID NO: 8986 - DNA, 19 bp, Artificial Sequence
  Description of Artificial Sequence: Synthetic oligonucleotide
aacatttctgaaagtgttg

SEQ ID NO: 8987 - DNA, 19 bp, Artificial Sequence
  Description of Artificial Sequence: Synthetic oligonucleotide
caacatttctgaaagtgtt

SEQ ID NO: 8988 - DNA, 19 bp, Artificial Sequence
  Description of Artificial Sequence: Synthetic oligonucleotide
tcaacatttctgaaagtgt

SEQ ID NO: 8989 - DNA, 19 bp, Artificial Sequence
  Description of Artificial Sequence: Synthetic oligonucleotide
ctcaacatttctgaaagtg

SEQ ID NO: 8990 - DNA, 19 bp, Artificial Sequence
  Description of Artificial Sequence: Synthetic oligonucleotide
actcaacatttctgaaagt

SEQ ID NO: 8991 - DNA, 19 bp, Artificial Sequence
  Description of Artificial Sequence: Synthetic oligonucleotide
tactcaacatttctgaaag

SEQ ID NO: 8992 - DNA, 19 bp, Artificial Sequence
  Description of Artificial Sequence: Synthetic oligonucleotide
ctactcaacatttctgaaa

SEQ ID NO: 8993 - DNA, 19 bp, Artificial Sequence
  Description of Artificial Sequence: Synthetic oligonucleotide
tctactcaacatttctgaa

SEQ ID NO: 8994 - DNA, 19 bp, Artificial Sequence
  Description of Artificial Sequence: Synthetic oligonucleotide
ctctactcaacatttctga

SEQ ID NO: 8995 - DNA, 19 bp, Artificial Sequence
  Description of Artificial Sequence: Synthetic oligonucleotide
tctctactcaacatttctg

SEQ ID NO: 8996 - DNA, 19 bp, Artificial Sequence
  Description of Artificial Sequence: Synthetic oligonucleotide
ctctctactcaacatttct

SEQ ID NO: 8997 - DNA, 19 bp, Artificial Sequence
  Description of Artificial Sequence: Synthetic oligonucleotide
cctctctactcaacatttc

SEQ ID NO: 8998 - DNA, 19 bp, Artificial Sequence
  Description of Artificial Sequence: Synthetic oligonucleotide
acctctctactcaacattt

SEQ ID NO: 8999 - DNA, 19 bp, Artificial Sequence
  Description of Artificial Sequence: Synthetic oligonucleotide
cacctctctactcaacatt

SEQ ID NO: 9000 - DNA, 19 bp, Artificial Sequence
  Description of Artificial Sequence: Synthetic oligonucleotide
acacctctctactcaacat

SEQ ID NO: 9001 - DNA, 19 bp, Artificial Sequence
  Description of Artificial Sequence: Synthetic oligonucleotide
gacacctctctactcaaca

SEQ ID NO: 9002 - DNA, 19 bp, Artificial Sequence
  Description of Artificial Sequence: Synthetic oligonucleotide
ggacacctctctactcaac

SEQ ID NO: 9003 - DNA, 19 bp, Artificial Sequence
  Description of Artificial Sequence: Synthetic oligonucleotide
gggacacctctctactcaa

SEQ ID NO: 9004 - DNA, 19 bp, Artificial Sequence
  Description of Artificial Sequence: Synthetic oligonucleotide
agggacacctctctactca

SEQ ID NO: 9005 - DNA, 19 bp, Artificial Sequence
  Description of Artificial Sequence: Synthetic oligonucleotide
tagggacacctctctactc

SEQ ID NO: 9006 - DNA, 19 bp, Artificial Sequence
  Description of Artificial Sequence: Synthetic oligonucleotide
ttagggacacctctctact

SEQ ID NO: 9007 - DNA, 19 bp, Artificial Sequence
  Description of Artificial Sequence: Synthetic oligonucleotide
tttagggacacctctctac

SEQ ID NO: 9008 - DNA, 19 bp, Artificial Sequence
  Description of Artificial Sequence: Synthetic oligonucleotide
ctttagggacacctctcta

SEQ ID NO: 9009 - DNA, 19 bp, Artificial Sequence
  Description of Artificial Sequence: Synthetic oligonucleotide
gctttagggacacctctct

SEQ ID NO: 9010 - DNA, 19 bp, Artificial Sequence
  Description of Artificial Sequence: Synthetic oligonucleotide
agctttagggacacctctc

SEQ ID NO: 9011 - DNA, 19 bp, Artificial Sequence
  Description of Artificial Sequence: Synthetic oligonucleotide
aagctttagggacacctct

SEQ ID NO: 9012 - DNA, 19 bp, Artificial Sequence
  Description of Artificial Sequence: Synthetic oligonucleotide
gaagctttagggacacctc

SEQ ID NO: 9013 - DNA, 19 bp, Artificial Sequence
  Description of Artificial Sequence: Synthetic oligonucleotide
tgaagctttagggacacct

SEQ ID NO: 9014 - DNA, 19 bp, Artificial Sequence
  Description of Artificial Sequence: Synthetic oligonucleotide
ttgaagctttagggacacc

SEQ ID NO: 9015 - DNA, 19 bp, Artificial Sequence
  Description of Artificial Sequence: Synthetic oligonucleotide
attgaagctttagggacac

SEQ ID NO: 9016 - DNA, 19 bp, Artificial Sequence
  Description of Artificial Sequence: Synthetic oligonucleotide
cattgaagctttagggaca

SEQ ID NO: 9017 - DNA, 19 bp, Artificial Sequence
  Description of Artificial Sequence: Synthetic oligonucleotide
ccattgaagctttagggac

SEQ ID NO: 9018 - DNA, 19 bp, Artificial Sequence
  Description of Artificial Sequence: Synthetic oligonucleotide
tccattgaagctttaggga

SEQ ID NO: 9019 - DNA, 19 bp, Artificial Sequence
  Description of Artificial Sequence: Synthetic oligonucleotide
ttccattgaagctttaggg

SEQ ID NO: 9020 - DNA, 19 bp, Artificial Sequence
  Description of Artificial Sequence: Synthetic oligonucleotide
gttccattgaagctttagg

SEQ ID NO: 9021 - DNA, 19 bp, Artificial Sequence
  Description of Artificial Sequence: Synthetic oligonucleotide
agttccattgaagctttag

SEQ ID NO: 9022 - DNA, 19 bp, Artificial Sequence
  Description of Artificial Sequence: Synthetic oligonucleotide
aagttccattgaagcttta

SEQ ID NO: 9023 - DNA, 19 bp, Artificial Sequence
  Description of Artificial Sequence: Synthetic oligonucleotide
taagttccattgaagcttt

SEQ ID NO: 9024 - DNA, 19 bp, Artificial Sequence
  Description of Artificial Sequence: Synthetic oligonucleotide
ttaagttccattgaagctt

SEQ ID NO: 9025 - DNA, 19 bp, Artificial Sequence
  Description of Artificial Sequence: Synthetic oligonucleotide
tttaagttccattgaagct

SEQ ID NO: 9026 - DNA, 19 bp, Artificial Sequence
  Description of Artificial Sequence: Synthetic oligonucleotide
gtttaagttccattgaagc

SEQ ID NO: 9027 - DNA, 19 bp, Artificial Sequence
  Description of Artificial Sequence: Synthetic oligonucleotide
agtttaagttccattgaag

SEQ ID NO: 9028 - DNA, 19 bp, Artificial Sequence
  Description of Artificial Sequence: Synthetic oligonucleotide
gagtttaagttccattgaa

SEQ ID NO: 9029 - DNA, 19 bp, Artificial Sequence
  Description of Artificial Sequence: Synthetic oligonucleotide
agagtttaagttccattga

SEQ ID NO: 9030 - DNA, 19 bp, Artificial Sequence
  Description of Artificial Sequence: Synthetic oligonucleotide
cagagtttaagttccattg

SEQ ID NO: 9031 - DNA, 19 bp, Artificial Sequence
  Description of Artificial Sequence: Synthetic oligonucleotide
acagagtttaagttccatt

SEQ ID NO: 9032 - DNA, 19 bp, Artificial Sequence
  Description of Artificial Sequence: Synthetic oligonucleotide
aacagagtttaagttccat

SEQ ID NO: 9033 - DNA, 19 bp, Artificial Sequence
  Description of Artificial Sequence: Synthetic oligonucleotide
caacagagtttaagttcca

SEQ ID NO: 9034 - DNA, 19 bp, Artificial Sequence
  Description of Artificial Sequence: Synthetic oligonucleotide
tcaacagagtttaagttcc

SEQ ID NO: 9035 - DNA, 19 bp, Artificial Sequence
  Description of Artificial Sequence: Synthetic oligonucleotide
gtcaacagagtttaagttc

SEQ ID NO: 9036 - DNA, 19 bp, Artificial Sequence
  Description of Artificial Sequence: Synthetic oligonucleotide
tgtcaacagagtttaagtt

SEQ ID NO: 9037 - DNA, 19 bp, Artificial Sequence
  Description of Artificial Sequence: Synthetic oligonucleotide
ttgtcaacagagtttaagt

SEQ ID NO: 9038 - DNA, 19 bp, Artificial Sequence
  Description of Artificial Sequence: Synthetic oligonucleotide
cttgtcaacagagtttaag

SEQ ID NO: 9039 - DNA, 19 bp, Artificial Sequence
  Description of Artificial Sequence: Synthetic oligonucleotide
gcttgtcaacagagtttaa

SEQ ID NO: 9040 - DNA, 19 bp, Artificial Sequence
  Description of Artificial Sequence: Synthetic oligonucleotide
cgcttgtcaacagagttta

SEQ ID NO: 9041 - DNA, 19 bp, Artificial Sequence
  Description of Artificial Sequence: Synthetic oligonucleotide
tcgcttgtcaacagagttt

SEQ ID NO: 9042 - DNA, 19 bp, Artificial Sequence
  Description of Artificial Sequence: Synthetic oligonucleotide
ctcgcttgtcaacagagtt

SEQ ID NO: 9043 - DNA, 19 bp, Artificial Sequence
  Description of Artificial Sequence: Synthetic oligonucleotide
actcgcttgtcaacagagt

SEQ ID NO: 9044 - DNA, 19 bp, Artificial Sequence
  Description of Artificial Sequence: Synthetic oligonucleotide
cactcgcttgtcaacagag

SEQ ID NO: 9045 - DNA, 19 bp, Artificial Sequence
  Description of Artificial Sequence: Synthetic oligonucleotide
gcactcgcttgtcaacaga

SEQ ID NO: 9046 - DNA, 19 bp, Artificial Sequence
  Description of Artificial Sequence: Synthetic oligonucleotide
ggcactcgcttgtcaacag

SEQ ID NO: 9047 - DNA, 19 bp, Artificial Sequence
  Description of Artificial Sequence: Synthetic oligonucleotide
cggcactcgcttgtcaaca

SEQ ID NO: 9048 - DNA, 19 bp, Artificial Sequence
  Description of Artificial Sequence: Synthetic oligonucleotide
ccggcactcgcttgtcaac

SEQ ID NO: 9049 - DNA, 19 bp, Artificial Sequence
  Description of Artificial Sequence: Synthetic oligonucleotide
accggcactcgcttgtcaa

SEQ ID NO: 9050 - DNA, 19 bp, Artificial Sequence
  Description of Artificial Sequence: Synthetic oligonucleotide
aaccggcactcgcttgtca

SEQ ID NO: 9051 - DNA, 19 bp, Artificial Sequence
  Description of Artificial Sequence: Synthetic oligonucleotide
aaaccggcactcgcttgtc

SEQ ID NO: 9052 - DNA, 19 bp, Artificial Sequence
  Description of Artificial Sequence: Synthetic oligonucleotide
aaaaccggcactcgcttgt

SEQ ID NO: 9053 - DNA, 19 bp, Artificial Sequence
  Description of Artificial Sequence: Synthetic oligonucleotide
gaaaaccggcactcgcttg

SEQ ID NO: 9054 - DNA, 19 bp, Artificial Sequence
  Description of Artificial Sequence: Synthetic oligonucleotide
tgaaaaccggcactcgctt

SEQ ID NO: 9055 - DNA, 19 bp, Artificial Sequence
  Description of Artificial Sequence: Synthetic oligonucleotide
gtgaaaaccggcactcgct

SEQ ID NO: 9056 - DNA, 19 bp, Artificial Sequence
  Description of Artificial Sequence: Synthetic oligonucleotide
agtgaaaaccggcactcgc

SEQ ID NO: 9057 - DNA, 19 bp, Artificial Sequence
  Description of Artificial Sequence: Synthetic oligonucleotide
aagtgaaaaccggcactcg

SEQ ID NO: 9058 - DNA, 19 bp, Artificial Sequence
  Description of Artificial Sequence: Synthetic oligonucleotide
caagtgaaaaccggcactc

SEQ ID NO: 9059 - DNA, 19 bp, Artificial Sequence
  Description of Artificial Sequence: Synthetic oligonucleotide
acaagtgaaaaccggcact

SEQ ID NO: 9060 - DNA, 19 bp, Artificial Sequence
  Description of Artificial Sequence: Synthetic oligonucleotide
aacaagtgaaaaccggcac

SEQ ID NO: 9061 - DNA, 19 bp, Artificial Sequence
  Description of Artificial Sequence: Synthetic oligonucleotide
caacaagtgaaaaccggca

SEQ ID NO: 9062 - DNA, 19 bp, Artificial Sequence
  Description of Artificial Sequence: Synthetic oligonucleotide
tcaacaagtgaaaaccggc

SEQ ID NO: 9063 - DNA, 19 bp, Artificial Sequence
  Description of Artificial Sequence: Synthetic oligonucleotide
ctcaacaagtgaaaaccgg

SEQ ID NO: 9064 - DNA, 19 bp, Artificial Sequence
  Description of Artificial Sequence: Synthetic oligonucleotide
tctcaacaagtgaaaaccg

SEQ ID NO: 9065 - DNA, 19 bp, Artificial Sequence
  Description of Artificial Sequence: Synthetic oligonucleotide
ttctcaacaagtgaaaacc

SEQ ID NO: 9066 - DNA, 19 bp, Artificial Sequence
  Description of Artificial Sequence: Synthetic oligonucleotide
cttctcaacaagtgaaaac

SEQ ID NO: 9067 - DNA, 19 bp, Artificial Sequence
  Description of Artificial Sequence: Synthetic oligonucleotide
tcttctcaacaagtgaaaa

SEQ ID NO: 9068 - DNA, 19 bp, Artificial Sequence
  Description of Artificial Sequence: Synthetic oligonucleotide
ctcttctcaacaagtgaaa

SEQ ID NO: 9069 - DNA, 19 bp, Artificial Sequence
  Description of Artificial Sequence: Synthetic oligonucleotide
tctcttctcaacaagtgaa

SEQ ID NO: 9070 - DNA, 19 bp, Artificial Sequence
  Description of Artificial Sequence: Synthetic oligonucleotide
atctcttctcaacaagtga

SEQ ID NO: 9071 - DNA, 19 bp, Artificial Sequence
  Description of Artificial Sequence: Synthetic oligonucleotide
catctcttctcaacaagtg

SEQ ID NO: 9072 - DNA, 19 bp, Artificial Sequence
  Description of Artificial Sequence: Synthetic oligonucleotide
acatctcttctcaacaagt

SEQ ID NO: 9073 - DNA, 19 bp, Artificial Sequence
  Description of Artificial Sequence: Synthetic oligonucleotide
cacatctcttctcaacaag

SEQ ID NO: 9074 - DNA, 19 bp, Artificial Sequence
  Description of Artificial Sequence: Synthetic oligonucleotide
acacatctcttctcaacaa

SEQ ID NO: 9075 - DNA, 19 bp, Artificial Sequence
  Description of Artificial Sequence: Synthetic oligonucleotide
cacacatctcttctcaaca

SEQ ID NO: 9076 - DNA, 19 bp, Artificial Sequence
  Description of Artificial Sequence: Synthetic oligonucleotide
gcacacatctcttctcaac

SEQ ID NO: 9077 - DNA, 19 bp, Artificial Sequence
  Description of Artificial Sequence: Synthetic oligonucleotide
ggcacacatctcttctcaa

SEQ ID NO: 9078 - DNA, 19 bp, Artificial Sequence
  Description of Artificial Sequence: Synthetic oligonucleotide
tggcacacatctcttctca

SEQ ID NO: 9079 - DNA, 19 bp, Artificial Sequence
  Description of Artificial Sequence: Synthetic oligonucleotide
atggcacacatctcttctc

SEQ ID NO: 9080 - DNA, 19 bp, Artificial Sequence
  Description of Artificial Sequence: Synthetic oligonucleotide
tatggcacacatctcttct

SEQ ID NO: 9081 - DNA, 19 bp, Artificial Sequence
  Description of Artificial Sequence: Synthetic oligonucleotide
atatggcacacatctcttc

SEQ ID NO: 9082 - DNA, 19 bp, Artificial Sequence
  Description of Artificial Sequence: Synthetic oligonucleotide
tatatggcacacatctctt

SEQ ID NO: 9083 - DNA, 19 bp, Artificial Sequence
  Description of Artificial Sequence: Synthetic oligonucleotide
gtatatggcacacatctct

SEQ ID NO: 9084 - DNA, 19 bp, Artificial Sequence
  Description of Artificial Sequence: Synthetic oligonucleotide
agtatatggcacacatctc

SEQ ID NO: 9085 - DNA, 19 bp, Artificial Sequence
  Description of Artificial Sequence: Synthetic oligonucleotide
aagtatatggcacacatct

SEQ ID NO: 9086 - DNA, 19 bp, Artificial Sequence
  Description of Artificial Sequence: Synthetic oligonucleotide
caagtatatggcacacatc

SEQ ID NO: 9087 - DNA, 19 bp, Artificial Sequence
  Description of Artificial Sequence: Synthetic oligonucleotide
ccaagtatatggcacacat

SEQ ID NO: 9088 - DNA, 19 bp, Artificial Sequence
  Description of Artificial Sequence: Synthetic oligonucleotide
accaagtatatggcacaca

SEQ ID NO: 9089 - DNA, 19 bp, Artificial Sequence
  Description of Artificial Sequence: Synthetic oligonucleotide
aaccaagtatatggcacac

SEQ ID NO: 9090 - DNA, 19 bp, Artificial Sequence
  Description of Artificial Sequence: Synthetic oligonucleotide
aaaccaagtatatggcaca

SEQ ID NO: 9091 - DNA, 19 bp, Artificial Sequence
  Description of Artificial Sequence: Synthetic oligonucleotide
caaaccaagtatatggcac

SEQ ID NO: 9092 - DNA, 19 bp, Artificial Sequence
  Description of Artificial Sequence: Synthetic oligonucleotide
ccaaaccaagtatatggca

SEQ ID NO: 9093 - DNA, 19 bp, Artificial Sequence
  Description of Artificial Sequence: Synthetic oligonucleotide
accaaaccaagtatatggc

SEQ ID NO: 9094 - DNA, 19 bp, Artificial Sequence
  Description of Artificial Sequence: Synthetic oligonucleotide
caccaaaccaagtatatgg

SEQ ID NO: 9095 - DNA, 19 bp, Artificial Sequence
  Description of Artificial Sequence: Synthetic oligonucleotide
ccaccaaaccaagtatatg

SEQ ID NO: 9096 - DNA, 19 bp, Artificial Sequence
  Description of Artificial Sequence: Synthetic oligonucleotide
gccaccaaaccaagtatat

SEQ ID NO: 9097 - DNA, 19 bp, Artificial Sequence
  Description of Artificial Sequence: Synthetic oligonucleotide
agccaccaaaccaagtata

SEQ ID NO: 9098 - DNA, 19 bp, Artificial Sequence
  Description of Artificial Sequence: Synthetic oligonucleotide
tagccaccaaaccaagtat

SEQ ID NO: 9099 - DNA, 19 bp, Artificial Sequence
  Description of Artificial Sequence: Synthetic oligonucleotide
gtagccaccaaaccaagta

SEQ ID NO: 9100 - DNA, 19 bp, Artificial Sequence
  Description of Artificial Sequence: Synthetic oligonucleotide
tgtagccaccaaaccaagt

SEQ ID NO: 9101 - DNA, 19 bp, Artificial Sequence
  Description of Artificial Sequence: Synthetic oligonucleotide
ctgtagccaccaaaccaag

SEQ ID NO: 9102 - DNA, 19 bp, Artificial Sequence
  Description of Artificial Sequence: Synthetic oligonucleotide
tctgtagccaccaaaccaa

SEQ ID NO: 9103 - DNA, 19 bp, Artificial Sequence
  Description of Artificial Sequence: Synthetic oligonucleotide
ctctgtagccaccaaacca

SEQ ID NO: 9104 - DNA, 19 bp, Artificial Sequence
  Description of Artificial Sequence: Synthetic oligonucleotide
actctgtagccaccaaacc

SEQ ID NO: 9105 - DNA, 19 bp, Artificial Sequence
  Description of Artificial Sequence: Synthetic oligonucleotide
tactctgtagccaccaaac

SEQ ID NO: 9106 - DNA, 19 bp, Artificial Sequence
  Description of Artificial Sequence: Synthetic oligonucleotide
gtactctgtagccaccaaa

SEQ ID NO: 9107 - DNA, 19 bp, Artificial Sequence
  Description of Artificial Sequence: Synthetic oligonucleotide
tgtactctgtagccaccaa

SEQ ID NO: 9108 - DNA, 19 bp, Artificial Sequence
  Description of Artificial Sequence: Synthetic oligonucleotide
ctgtactctgtagccacca

SEQ ID NO: 9109 - DNA, 19 bp, Artificial Sequence
  Description of Artificial Sequence: Synthetic oligonucleotide
gctgtactctgtagccacc

SEQ ID NO: 9110 - DNA, 19 bp, Artificial Sequence
  Description of Artificial Sequence: Synthetic oligonucleotide
ggctgtactctgtagccac

SEQ ID NO: 9111 - DNA, 19 bp, Artificial Sequence
  Description of Artificial Sequence: Synthetic oligonucleotide
aggctgtactctgtagcca

SEQ ID NO: 9112 - DNA, 19 bp, Artificial Sequence
  Description of Artificial Sequence: Synthetic oligonucleotide
caggctgtactctgtagcc

SEQ ID NO: 9113 - DNA, 19 bp, Artificial Sequence
  Description of Artificial Sequence: Synthetic oligonucleotide
gcaggctgtactctgtagc

SEQ ID NO: 9114 - DNA, 19 bp, Artificial Sequence
  Description of Artificial Sequence: Synthetic oligonucleotide
agcaggctgtactctgtag

SEQ ID NO: 9115 - DNA, 19 bp, Artificial Sequence
  Description of Artificial Sequence: Synthetic oligonucleotide
cagcaggctgtactctgta

SEQ ID NO: 9116 - DNA, 19 bp, Artificial Sequence
  Description of Artificial Sequence: Synthetic oligonucleotide
gcagcaggctgtactctgt

SEQ ID NO: 9117 - DNA, 19 bp, Artificial Sequence
  Description of Artificial Sequence: Synthetic oligonucleotide
agcagcaggctgtactctg

SEQ ID NO: 9118 - DNA, 19 bp, Artificial Sequence
  Description of Artificial Sequence: Synthetic oligonucleotide
aagcagcaggctgtactct

SEQ ID NO: 9119 - DNA, 19 bp, Artificial Sequence
  Description of Artificial Sequence: Synthetic oligonucleotide
taagcagcaggctgtactc

SEQ ID NO: 9120 - DNA, 19 bp, Artificial Sequence
  Description of Artificial Sequence: Synthetic oligonucleotide
ttaagcagcaggctgtact

SEQ ID NO: 9121 - DNA, 19 bp, Artificial Sequence
  Description of Artificial Sequence: Synthetic oligonucleotide
gttaagcagcaggctgtac

SEQ ID NO: 9122 - DNA, 19 bp, Artificial Sequence
  Description of Artificial Sequence: Synthetic oligonucleotide
ggttaagcagcaggctgta

SEQ ID NO: 9123 - DNA, 19 bp, Artificial Sequence
  Description of Artificial Sequence: Synthetic oligonucleotide
gggttaagcagcaggctgt

SEQ ID NO: 9124 - DNA, 19 bp, Artificial Sequence
  Description of Artificial Sequence: Synthetic oligonucleotide
agggttaagcagcaggctg

SEQ ID NO: 9125 - DNA, 19 bp, Artificial Sequence
  Description of Artificial Sequence: Synthetic oligonucleotide
gagggttaagcagcaggct

SEQ ID NO: 9126 - DNA, 19 bp, Artificial Sequence
  Description of Artificial Sequence: Synthetic oligonucleotide
tgagggttaagcagcaggc

SEQ ID NO: 9127 - DNA, 19 bp, Artificial Sequence
  Description of Artificial Sequence: Synthetic oligonucleotide
ctgagggttaagcagcagg

SEQ ID NO: 9128 - DNA, 19 bp, Artificial Sequence
  Description of Artificial Sequence: Synthetic oligonucleotide
tctgagggttaagcagcag

SEQ ID NO: 9129 - DNA, 19 bp, Artificial Sequence
  Description of Artificial Sequence: Synthetic oligonucleotide
ctctgagggttaagcagca

SEQ ID NO: 9130 - DNA, 19 bp, Artificial Sequence
  Description of Artificial Sequence: Synthetic oligonucleotide
cctctgagggttaagcagc

SEQ ID NO: 9131 - DNA, 19 bp, Artificial Sequence
  Description of Artificial Sequence: Synthetic oligonucleotide
tcctctgagggttaagcag

SEQ ID NO: 9132 - DNA, 19 bp, Artificial Sequence
  Description of Artificial Sequence: Synthetic oligonucleotide
ctcctctgagggttaagca

SEQ ID NO: 9133 - DNA, 19 bp, Artificial Sequence
  Description of Artificial Sequence: Synthetic oligonucleotide
tctcctctgagggttaagc

SEQ ID NO: 9134 - DNA, 19 bp, Artificial Sequence
  Description of Artificial Sequence: Synthetic oligonucleotide
gtctcctctgagggttaag

SEQ ID NO: 9135 - DNA, 19 bp, Artificial Sequence
  Description of Artificial Sequence: Synthetic oligonucleotide
agtctcctctgagggttaa

SEQ ID NO: 9136 - DNA, 19 bp, Artificial Sequence
  Description of Artificial Sequence: Synthetic oligonucleotide
cagtctcctctgagggtta

SEQ ID NO: 9137 - DNA, 19 bp, Artificial Sequence
  Description of Artificial Sequence: Synthetic oligonucleotide
tcagtctcctctgagggtt

SEQ ID NO: 9138 - DNA, 19 bp, Artificial Sequence
  Description of Artificial Sequence: Synthetic oligonucleotide
atcagtctcctctgagggt

SEQ ID NO: 9139 - DNA, 19 bp, Artificial Sequence
  Description of Artificial Sequence: Synthetic oligonucleotide
gatcagtctcctctgaggg

SEQ ID NO: 9140 - DNA, 19 bp, Artificial Sequence
  Description of Artificial Sequence: Synthetic oligonucleotide
ggatcagtctcctctgagg

SEQ ID NO: 9141 - DNA, 19 bp, Artificial Sequence
  Description of Artificial Sequence: Synthetic oligonucleotide
tggatcagtctcctctgag

SEQ ID NO: 9142 - DNA, 19 bp, Artificial Sequence
  Description of Artificial Sequence: Synthetic oligonucleotide
ctggatcagtctcctctga

SEQ ID NO: 9143 - DNA, 19 bp, Artificial Sequence
  Description of Artificial Sequence: Synthetic oligonucleotide
actggatcagtctcctctg

SEQ ID NO: 9144 - DNA, 19 bp, Artificial Sequence
  Description of Artificial Sequence: Synthetic oligonucleotide
aactggatcagtctcctct

SEQ ID NO: 9145 - DNA, 19 bp, Artificial Sequence
  Description of Artificial Sequence: Synthetic oligonucleotide
caactggatcagtctcctc

SEQ ID NO: 9146 - DNA, 19 bp, Artificial Sequence
  Description of Artificial Sequence: Synthetic oligonucleotide
ccaactggatcagtctcct

SEQ ID NO: 9147 - DNA, 19 bp, Artificial Sequence
  Description of Artificial Sequence: Synthetic oligonucleotide
cccaactggatcagtctcc

SEQ ID NO: 9148 - DNA, 19 bp, Artificial Sequence
  Description of Artificial Sequence: Synthetic oligonucleotide
tcccaactggatcagtctc

SEQ ID NO: 9149 - DNA, 19 bp, Artificial Sequence
  Description of Artificial Sequence: Synthetic oligonucleotide
ttcccaactggatcagtct

SEQ ID NO: 9150 - DNA, 19 bp, Artificial Sequence
  Description of Artificial Sequence: Synthetic oligonucleotide
tttcccaactggatcagtc

SEQ ID NO: 9151 - DNA, 19 bp, Artificial Sequence
  Description of Artificial Sequence: Synthetic oligonucleotide
atttcccaactggatcagt

SEQ ID NO: 9152 - DNA, 19 bp, Artificial Sequence
  Description of Artificial Sequence: Synthetic oligonucleotide
aatttcccaactggatcag

SEQ ID NO: 9153 - DNA, 19 bp, Artificial Sequence
  Description of Artificial Sequence: Synthetic oligonucleotide
gaatttcccaactggatca

SEQ ID NO: 9154 - DNA, 19 bp, Artificial Sequence
  Description of Artificial Sequence: Synthetic oligonucleotide
tgaatttcccaactggatc

SEQ ID NO: 9155 - DNA, 19 bp, Artificial Sequence
  Description of Artificial Sequence: Synthetic oligonucleotide
ctgaatttcccaactggat

SEQ ID NO: 9156 - DNA, 19 bp, Artificial Sequence
  Description of Artificial Sequence: Synthetic oligonucleotide
tctgaatttcccaactgga

SEQ ID NO: 9157 - DNA, 19 bp, Artificial Sequence
  Description of Artificial Sequence: Synthetic oligonucleotide
ctctgaatttcccaactgg

SEQ ID NO: 9158 - DNA, 19 bp, Artificial Sequence
  Description of Artificial Sequence: Synthetic oligonucleotide
gctctgaatttcccaactg

SEQ ID NO: 9159 - DNA, 19 bp, Artificial Sequence
  Description of Artificial Sequence: Synthetic oligonucleotide
tgctctgaatttcccaact

SEQ ID NO: 9160 - DNA, 19 bp, Artificial Sequence
  Description of Artificial Sequence: Synthetic oligonucleotide
ctgctctgaatttcccaac

SEQ ID NO: 9161 - DNA, 19 bp, Artificial Sequence
  Description of Artificial Sequence: Synthetic oligonucleotide
gctgctctgaatttcccaa

SEQ ID NO: 9162 - DNA, 19 bp, Artificial Sequence
  Description of Artificial Sequence: Synthetic oligonucleotide
agctgctctgaatttccca

SEQ ID NO: 9163 - DNA, 19 bp, Artificial Sequence
  Description of Artificial Sequence: Synthetic oligonucleotide
gagctgctctgaatttccc

SEQ ID NO: 9164 - DNA, 19 bp, Artificial Sequence
  Description of Artificial Sequence: Synthetic oligonucleotide
ggagctgctctgaatttcc

SEQ ID NO: 9165 - DNA, 19 bp, Artificial Sequence
  Description of Artificial Sequence: Synthetic oligonucleotide
aggagctgctctgaatttc

SEQ ID NO: 9166 - DNA, 19 bp, Artificial Sequence
  Description of Artificial Sequence: Synthetic oligonucleotide
caggagctgctctgaattt

SEQ ID NO: 9167 - DNA, 19 bp, Artificial Sequence
  Description of Artificial Sequence: Synthetic oligonucleotide
gcaggagctgctctgaatt

SEQ ID NO: 9168 - DNA, 19 bp, Artificial Sequence
  Description of Artificial Sequence: Synthetic oligonucleotide
agcaggagctgctctgaat

SEQ ID NO: 9169 - DNA, 19 bp, Artificial Sequence
  Description of Artificial Sequence: Synthetic oligonucleotide
gagcaggagctgctctgaa

SEQ ID NO: 9170 - DNA, 19 bp, Artificial Sequence
  Description of Artificial Sequence: Synthetic oligonucleotide
ggagcaggagctgctctga

SEQ ID NO: 9171 - DNA, 19 bp, Artificial Sequence
  Description of Artificial Sequence: Synthetic oligonucleotide
tggagcaggagctgctctg

SEQ ID NO: 9172 - DNA, 19 bp, Artificial Sequence
  Description of Artificial Sequence: Synthetic oligonucleotide
ctggagcaggagctgctct

SEQ ID NO: 9173 - DNA, 19 bp, Artificial Sequence
  Description of Artificial Sequence: Synthetic oligonucleotide
cctggagcaggagctgctc

SEQ ID NO: 9174 - DNA, 19 bp, Artificial Sequence
  Description of Artificial Sequence: Synthetic oligonucleotide
gcctggagcaggagctgct

SEQ ID NO: 9175 - DNA, 19 bp, Artificial Sequence
  Description of Artificial Sequence: Synthetic oligonucleotide
tgcctggagcaggagctgc

SEQ ID NO: 9176 - DNA, 19 bp, Artificial Sequence
  Description of Artificial Sequence: Synthetic oligonucleotide
ctgcctggagcaggagctg

SEQ ID NO: 9177 - DNA, 19 bp, Artificial Sequence
  Description of Artificial Sequence: Synthetic oligonucleotide
gctgcctggagcaggagct

SEQ ID NO: 9178 - DNA, 19 bp, Artificial Sequence
  Description of Artificial Sequence: Synthetic oligonucleotide
ggctgcctggagcaggagc

SEQ ID NO: 9179 - DNA, 19 bp, Artificial Sequence
  Description of Artificial Sequence: Synthetic oligonucleotide
tggctgcctggagcaggag

SEQ ID NO: 9180 - DNA, 19 bp, Artificial Sequence
  Description of Artificial Sequence: Synthetic oligonucleotide
ctggctgcctggagcagga

SEQ ID NO: 9181 - DNA, 19 bp, Artificial Sequence
  Description of Artificial Sequence: Synthetic oligonucleotide
tctggctgcctggagcagg

SEQ ID NO: 9182 - DNA, 19 bp, Artificial Sequence
  Description of Artificial Sequence: Synthetic oligonucleotide
ttctggctgcctggagcag

SEQ ID NO: 9183 - DNA, 19 bp, Artificial Sequence
  Description of Artificial Sequence: Synthetic oligonucleotide
cttctggctgcctggagca

SEQ ID NO: 9184 - DNA, 19 bp, Artificial Sequence
  Description of Artificial Sequence: Synthetic oligonucleotide
gcttctggctgcctggagc

SEQ ID NO: 9185 - DNA, 19 bp, Artificial Sequence
  Description of Artificial Sequence: Synthetic oligonucleotide
tgcttctggctgcctggag

SEQ ID NO: 9186 - DNA, 19 bp, Artificial Sequence
  Description of Artificial Sequence: Synthetic oligonucleotide
ctgcttctggctgcctgga

SEQ ID NO: 9187 - DNA, 19 bp, Artificial Sequence
  Description of Artificial Sequence: Synthetic oligonucleotide
gctgcttctggctgcctgg

SEQ ID NO: 9188 - DNA, 19 bp, Artificial Sequence
  Description of Artificial Sequence: Synthetic oligonucleotide
tgctgcttctggctgcctg

SEQ ID NO: 9189 - DNA, 19 bp, Artificial Sequence
  Description of Artificial Sequence: Synthetic oligonucleotide
ctgctgcttctggctgcct

SEQ ID NO: 9190 - DNA, 19 bp, Artificial Sequence
  Description of Artificial Sequence: Synthetic oligonucleotide
actgctgcttctggctgcc

SEQ ID NO: 9191 - DNA, 19 bp, Artificial Sequence
  Description of Artificial Sequence: Synthetic oligonucleotide
cactgctgcttctggctgc

SEQ ID NO: 9192 - DNA, 19 bp, Artificial Sequence
  Description of Artificial Sequence: Synthetic oligonucleotide
ccactgctgcttctggctg

SEQ ID NO: 9193 - DNA, 19 bp, Artificial Sequence
  Description of Artificial Sequence: Synthetic oligonucleotide
cccactgctgcttctggct

SEQ ID NO: 9194 - DNA, 19 bp, Artificial Sequence
  Description of Artificial Sequence: Synthetic oligonucleotide
ccccactgctgcttctggc

SEQ ID NO: 9195 - DNA, 19 bp, Artificial Sequence
  Description of Artificial Sequence: Synthetic oligonucleotide
cccccactgctgcttctgg

SEQ ID NO: 9196 - DNA, 19 bp, Artificial Sequence
  Description of Artificial Sequence: Synthetic oligonucleotide
ccccccactgctgcttctg

SEQ ID NO: 9197 - DNA, 19 bp, Artificial Sequence
  Description of Artificial Sequence: Synthetic oligonucleotide
accccccactgctgcttct

SEQ ID NO: 9198 - DNA, 19 bp, Artificial Sequence
  Description of Artificial Sequence: Synthetic oligonucleotide
caccccccactgctgcttc

SEQ ID NO: 9199 - DNA, 19 bp, Artificial Sequence
  Description of Artificial Sequence: Synthetic oligonucleotide
ccaccccccactgctgctt

SEQ ID NO: 9200 - DNA, 19 bp, Artificial Sequence
  Description of Artificial Sequence: Synthetic oligonucleotide
cccaccccccactgctgct

SEQ ID NO: 9201 - DNA, 19 bp, Artificial Sequence
  Description of Artificial Sequence: Synthetic oligonucleotide
ccccaccccccactgctgc

SEQ ID NO: 9202 - DNA, 19 bp, Artificial Sequence
  Description of Artificial Sequence: Synthetic oligonucleotide
cccccaccccccactgctg

SEQ ID NO: 9203 - DNA, 19 bp, Artificial Sequence
  Description of Artificial Sequence: Synthetic oligonucleotide
acccccaccccccactgct

SEQ ID NO: 9204 - DNA, 19 bp, Artificial Sequence
  Description of Artificial Sequence: Synthetic oligonucleotide
cacccccaccccccactgc

SEQ ID NO: 9205 - DNA, 19 bp, Artificial Sequence
  Description of Artificial Sequence: Synthetic oligonucleotide
ccacccccaccccccactg

SEQ ID NO: 9206 - DNA, 19 bp, Artificial Sequence
  Description of Artificial Sequence: Synthetic oligonucleotide
cccacccccaccccccact

SEQ ID NO: 9207 - DNA, 19 bp, Artificial Sequence
  Description of Artificial Sequence: Synthetic oligonucleotide
ccccacccccaccccccac

SEQ ID NO: 9208 - DNA, 19 bp, Artificial Sequence
  Description of Artificial Sequence: Synthetic oligonucleotide
tccccacccccacccccca

SEQ ID NO: 9209 - DNA, 19 bp, Artificial Sequence
  Description of Artificial Sequence: Synthetic oligonucleotide
atccccacccccacccccc

SEQ ID NO: 9210 - DNA, 19 bp, Artificial Sequence
  Description of Artificial Sequence: Synthetic oligonucleotide
aatccccacccccaccccc

SEQ ID NO: 9211 - DNA, 19 bp, Artificial Sequence
  Description of Artificial Sequence: Synthetic oligonucleotide
gaatccccacccccacccc

SEQ ID NO: 9212 - DNA, 19 bp, Artificial Sequence
  Description of Artificial Sequence: Synthetic oligonucleotide
ggaatccccacccccaccc

SEQ ID NO: 9213 - DNA, 19 bp, Artificial Sequence
  Description of Artificial Sequence: Synthetic oligonucleotide
aggaatccccacccccacc

SEQ ID NO: 9214 - DNA, 19 bp, Artificial Sequence
  Description of Artificial Sequence: Synthetic oligonucleotide
aaggaatccccacccccac

SEQ ID NO: 9215 - DNA, 19 bp, Artificial Sequence
  Description of Artificial Sequence: Synthetic oligonucleotide
caaggaatccccaccccca

SEQ ID NO: 9216 - DNA, 19 bp, Artificial Sequence
  Description of Artificial Sequence: Synthetic oligonucleotide
acaaggaatccccaccccc

SEQ ID NO: 9217 - DNA, 19 bp, Artificial Sequence
  Description of Artificial Sequence: Synthetic oligonucleotide
cacaaggaatccccacccc

SEQ ID NO: 9218 - DNA, 19 bp, Artificial Sequence
  Description of Artificial Sequence: Synthetic oligonucleotide
acacaaggaatccccaccc

SEQ ID NO: 9219 - DNA, 19 bp, Artificial Sequence
  Description of Artificial Sequence: Synthetic oligonucleotide
aacacaaggaatccccacc

SEQ ID NO: 9220 - DNA, 19 bp, Artificial Sequence
  Description of Artificial Sequence: Synthetic oligonucleotide
taacacaaggaatccccac

SEQ ID NO: 9221 - DNA, 19 bp, Artificial Sequence
  Description of Artificial Sequence: Synthetic oligonucleotide
ttaacacaaggaatcccca

SEQ ID NO: 9222 - DNA, 19 bp, Artificial Sequence
  Description of Artificial Sequence: Synthetic oligonucleotide
cttaacacaaggaatcccc

SEQ ID NO: 9223 - DNA, 19 bp, Artificial Sequence
  Description of Artificial Sequence: Synthetic oligonucleotide
acttaacacaaggaatccc

SEQ ID NO: 9224 - DNA, 19 bp, Artificial Sequence
  Description of Artificial Sequence: Synthetic oligonucleotide
cacttaacacaaggaatcc

SEQ ID NO: 9225 - DNA, 19 bp, Artificial Sequence
  Description of Artificial Sequence: Synthetic oligonucleotide
gcacttaacacaaggaatc

SEQ ID NO: 9226 - DNA, 19 bp, Artificial Sequence
  Description of Artificial Sequence: Synthetic oligonucleotide
ggcacttaacacaaggaat

SEQ ID NO: 9227 - DNA, 19 bp, Artificial Sequence
  Description of Artificial Sequence: Synthetic oligonucleotide
tggcacttaacacaaggaa

SEQ ID NO: 9228 - DNA, 19 bp, Artificial Sequence
  Description of Artificial Sequence: Synthetic oligonucleotide
gtggcacttaacacaagga

SEQ ID NO: 9229 - DNA, 19 bp, Artificial Sequence
  Description of Artificial Sequence: Synthetic oligonucleotide
tgtggcacttaacacaagg

SEQ ID NO: 9230 - DNA, 19 bp, Artificial Sequence
  Description of Artificial Sequence: Synthetic oligonucleotide
gtgtggcacttaacacaag

SEQ ID NO: 9231 - DNA, 19 bp, Artificial Sequence
  Description of Artificial Sequence: Synthetic oligonucleotide
tgtgtggcacttaacacaa

SEQ ID NO: 9232 - DNA, 19 bp, Artificial Sequence
  Description of Artificial Sequence: Synthetic oligonucleotide
ttgtgtggcacttaacaca

SEQ ID NO: 9233 - DNA, 19 bp, Artificial Sequence
  Description of Artificial Sequence: Synthetic oligonucleotide
gttgtgtggcacttaacac

SEQ ID NO: 9234 - DNA, 19 bp, Artificial Sequence
  Description of Artificial Sequence: Synthetic oligonucleotide
agttgtgtggcacttaaca

SEQ ID NO: 9235 - DNA, 19 bp, Artificial Sequence
  Description of Artificial Sequence: Synthetic oligonucleotide
cagttgtgtggcacttaac

SEQ ID NO: 9236 - DNA, 19 bp, Artificial Sequence
  Description of Artificial Sequence: Synthetic oligonucleotide
tcagttgtgtggcacttaa

SEQ ID NO: 9237 - DNA, 19 bp, Artificial Sequence
  Description of Artificial Sequence: Synthetic oligonucleotide
gtcagttgtgtggcactta

SEQ ID NO: 9238 - DNA, 19 bp, Artificial Sequence
  Description of Artificial Sequence: Synthetic oligonucleotide
tgtcagttgtgtggcactt

SEQ ID NO: 9239 - DNA, 19 bp, Artificial Sequence
  Description of Artificial Sequence: Synthetic oligonucleotide
ttgtcagttgtgtggcact

SEQ ID NO: 9240 - DNA, 19 bp, Artificial Sequence
  Description of Artificial Sequence: Synthetic oligonucleotide
cttgtcagttgtgtggcac

SEQ ID NO: 9241 - DNA, 19 bp, Artificial Sequence
  Description of Artificial Sequence: Synthetic oligonucleotide
ccttgtcagttgtgtggca

SEQ ID NO: 9242 - DNA, 19 bp, Artificial Sequence
  Description of Artificial Sequence: Synthetic oligonucleotide
tccttgtcagttgtgtggc

SEQ ID NO: 9243 - DNA, 19 bp, Artificial Sequence
  Description of Artificial Sequence: Synthetic oligonucleotide
ctccttgtcagttgtgtgg

SEQ ID NO: 9244 - DNA, 19 bp, Artificial Sequence
  Description of Artificial Sequence: Synthetic oligonucleotide
tctccttgtcagttgtgtg

SEQ ID NO: 9245 - DNA, 19 bp, Artificial Sequence
  Description of Artificial Sequence: Synthetic oligonucleotide
atctccttgtcagttgtgt

SEQ ID NO: 9246 - DNA, 19 bp, Artificial Sequence
  Description of Artificial Sequence: Synthetic oligonucleotide
gatctccttgtcagttgtg

SEQ ID NO: 9247 - DNA, 19 bp, Artificial Sequence
  Description of Artificial Sequence: Synthetic oligonucleotide
agatctccttgtcagttgt

SEQ ID NO: 9248 - DNA, 19 bp, Artificial Sequence
  Description of Artificial Sequence: Synthetic oligonucleotide
cagatctccttgtcagttg

SEQ ID NO: 9249 - DNA, 19 bp, Artificial Sequence
  Description of Artificial Sequence: Synthetic oligonucleotide
acagatctccttgtcagtt

SEQ ID NO: 9250 - DNA, 19 bp, Artificial Sequence
  Description of Artificial Sequence: Synthetic oligonucleotide
cacagatctccttgtcagt

SEQ ID NO: 9251 - DNA, 19 bp, Artificial Sequence
  Description of Artificial Sequence: Synthetic oligonucleotide
ccacagatctccttgtcag

SEQ ID NO: 9252 - DNA, 19 bp, Artificial Sequence
  Description of Artificial Sequence: Synthetic oligonucleotide
tccacagatctccttgtca

SEQ ID NO: 9253 - DNA, 19 bp, Artificial Sequence
  Description of Artificial Sequence: Synthetic oligonucleotide
ctccacagatctccttgtc

SEQ ID NO: 9254 - DNA, 19 bp, Artificial Sequence
  Description of Artificial Sequence: Synthetic oligonucleotide
actccacagatctccttgt

SEQ ID NO: 9255 - DNA, 19 bp, Artificial Sequence
  Description of Artificial Sequence: Synthetic oligonucleotide
aactccacagatctccttg

SEQ ID NO: 9256 - DNA, 19 bp, Artificial Sequence
  Description of Artificial Sequence: Synthetic oligonucleotide
aaactccacagatctcctt

SEQ ID NO: 9257 - DNA, 19 bp, Artificial Sequence
  Description of Artificial Sequence: Synthetic oligonucleotide
aaaactccacagatctcct

SEQ ID NO: 9258 - DNA, 19 bp, Artificial Sequence
  Description of Artificial Sequence: Synthetic oligonucleotide
aaaaactccacagatctcc

SEQ ID NO: 9259 - DNA, 19 bp, Artificial Sequence
  Description of Artificial Sequence: Synthetic oligonucleotide
gaaaaactccacagatctc

SEQ ID NO: 9260 - DNA, 19 bp, Artificial Sequence
  Description of Artificial Sequence: Synthetic oligonucleotide
agaaaaactccacagatct

SEQ ID NO: 9261 - DNA, 19 bp, Artificial Sequence
  Description of Artificial Sequence: Synthetic oligonucleotide
gagaaaaactccacagatc

SEQ ID NO: 9262 - DNA, 19 bp, Artificial Sequence
  Description of Artificial Sequence: Synthetic oligonucleotide
ggagaaaaactccacagat

SEQ ID NO: 9263 - DNA, 19 bp, Artificial Sequence
  Description of Artificial Sequence: Synthetic oligonucleotide
tggagaaaaactccacaga

SEQ ID NO: 9264 - DNA, 19 bp, Artificial Sequence
  Description of Artificial Sequence: Synthetic oligonucleotide
ttggagaaaaactccacag

SEQ ID NO: 9265 - DNA, 19 bp, Artificial Sequence
  Description of Artificial Sequence: Synthetic oligonucleotide
cttggagaaaaactccaca

SEQ ID NO: 9266 - DNA, 19 bp, Artificial Sequence
  Description of Artificial Sequence: Synthetic oligonucleotide
acttggagaaaaactccac

SEQ ID NO: 9267 - DNA, 19 bp, Artificial Sequence
  Description of Artificial Sequence: Synthetic oligonucleotide
cacttggagaaaaactcca

SEQ ID NO: 9268 - DNA, 19 bp, Artificial Sequence
  Description of Artificial Sequence: Synthetic oligonucleotide
tcacttggagaaaaactcc

SEQ ID NO: 9269 - DNA, 19 bp, Artificial Sequence
  Description of Artificial Sequence: Synthetic oligonucleotide
ttcacttggagaaaaactc

SEQ ID NO: 9270 - DNA, 19 bp, Artificial Sequence
  Description of Artificial Sequence: Synthetic oligonucleotide
gttcacttggagaaaaact

SEQ ID NO: 9271 - DNA, 19 bp, Artificial Sequence
  Description of Artificial Sequence: Synthetic oligonucleotide
ggttcacttggagaaaaac

SEQ ID NO: 9272 - DNA, 19 bp, Artificial Sequence
  Description of Artificial Sequence: Synthetic oligonucleotide
tggttcacttggagaaaaa

SEQ ID NO: 9273 - DNA, 19 bp, Artificial Sequence
  Description of Artificial Sequence: Synthetic oligonucleotide
ttggttcacttggagaaaa

SEQ ID NO: 9274 - DNA, 19 bp, Artificial Sequence
  Description of Artificial Sequence: Synthetic oligonucleotide
attggttcacttggagaaa

SEQ ID NO: 9275 - DNA, 19 bp, Artificial Sequence
  Description of Artificial Sequence: Synthetic oligonucleotide
gattggttcacttggagaa

SEQ ID NO: 9276 - DNA, 19 bp, Artificial Sequence
  Description of Artificial Sequence: Synthetic oligonucleotide
ggattggttcacttggaga

SEQ ID NO: 9277 - DNA, 19 bp, Artificial Sequence
  Description of Artificial Sequence: Synthetic oligonucleotide
gggattggttcacttggag

SEQ ID NO: 9278 - DNA, 19 bp, Artificial Sequence
  Description of Artificial Sequence: Synthetic oligonucleotide
ggggattggttcacttgga

SEQ ID NO: 9279 - DNA, 19 bp, Artificial Sequence
  Description of Artificial Sequence: Synthetic oligonucleotide
aggggattggttcacttgg

SEQ ID NO: 9280 - DNA, 19 bp, Artificial Sequence
  Description of Artificial Sequence: Synthetic oligonucleotide
caggggattggttcacttg

SEQ ID NO: 9281 - DNA, 19 bp, Artificial Sequence
  Description of Artificial Sequence: Synthetic oligonucleotide
acaggggattggttcactt

SEQ ID NO: 9282 - DNA, 19 bp, Artificial Sequence
  Description of Artificial Sequence: Synthetic oligonucleotide
cacaggggattggttcact

SEQ ID NO: 9283 - DNA, 19 bp, Artificial Sequence
  Description of Artificial Sequence: Synthetic oligonucleotide
acacaggggattggttcac

SEQ ID NO: 9284 - DNA, 19 bp, Artificial Sequence
  Description of Artificial Sequence: Synthetic oligonucleotide
gacacaggggattggttca

SEQ ID NO: 9285 - DNA, 19 bp, Artificial Sequence
  Description of Artificial Sequence: Synthetic oligonucleotide
ggacacaggggattggttc

SEQ ID NO: 9286 - DNA, 19 bp, Artificial Sequence
  Description of Artificial Sequence: Synthetic oligonucleotide
aggacacaggggattggtt

SEQ ID NO: 9287 - DNA, 19 bp, Artificial Sequence
  Description of Artificial Sequence: Synthetic oligonucleotide
caggacacaggggattggt

SEQ ID NO: 9288 - DNA, 19 bp, Artificial Sequence
  Description of Artificial Sequence: Synthetic oligonucleotide
ccaggacacaggggattgg

SEQ ID NO: 9289 - DNA, 19 bp, Artificial Sequence
  Description of Artificial Sequence: Synthetic oligonucleotide
gccaggacacaggggattg

SEQ ID NO: 9290 - DNA, 19 bp, Artificial Sequence
  Description of Artificial Sequence: Synthetic oligonucleotide
agccaggacacaggggatt

SEQ ID NO: 9291 - DNA, 19 bp, Artificial Sequence
  Description of Artificial Sequence: Synthetic oligonucleotide
gagccaggacacaggggat

SEQ ID NO: 9292 - DNA, 19 bp, Artificial Sequence
  Description of Artificial Sequence: Synthetic oligonucleotide
tgagccaggacacagggga

SEQ ID NO: 9293 - DNA, 19 bp, Artificial Sequence
  Description of Artificial Sequence: Synthetic oligonucleotide
gtgagccaggacacagggg

SEQ ID NO: 9294 - DNA, 19 bp, Artificial Sequence
  Description of Artificial Sequence: Synthetic oligonucleotide
tgtgagccaggacacaggg

SEQ ID NO: 9295 - DNA, 19 bp, Artificial Sequence
  Description of Artificial Sequence: Synthetic oligonucleotide
gtgtgagccaggacacagg

SEQ ID NO: 9296 - DNA, 19 bp, Artificial Sequence
  Description of Artificial Sequence: Synthetic oligonucleotide
agtgtgagccaggacacag

SEQ ID NO: 9297 - DNA, 19 bp, Artificial Sequence
  Description of Artificial Sequence: Synthetic oligonucleotide
cagtgtgagccaggacaca

SEQ ID NO: 9298 - DNA, 19 bp, Artificial Sequence
  Description of Artificial Sequence: Synthetic oligonucleotide
acagtgtgagccaggacac

SEQ ID NO: 9299 - DNA, 19 bp, Artificial Sequence
  Description of Artificial Sequence: Synthetic oligonucleotide
cacagtgtgagccaggaca

SEQ ID NO: 9300 - DNA, 19 bp, Artificial Sequence
  Description of Artificial Sequence: Synthetic oligonucleotide
ccacagtgtgagccaggac

SEQ ID NO: 9301 - DNA, 19 bp, Artificial Sequence
  Description of Artificial Sequence: Synthetic oligonucleotide
accacagtgtgagccagga

SEQ ID NO: 9302 - DNA, 19 bp, Artificial Sequence
  Description of Artificial Sequence: Synthetic oligonucleotide
aaccacagtgtgagccagg

SEQ ID NO: 9303 - DNA, 19 bp, Artificial Sequence
  Description of Artificial Sequence: Synthetic oligonucleotide
taaccacagtgtgagccag

SEQ ID NO: 9304 - DNA, 19 bp, Artificial Sequence
  Description of Artificial Sequence: Synthetic oligonucleotide
ctaaccacagtgtgagcca

SEQ ID NO: 9305 - DNA, 19 bp, Artificial Sequence
  Description of Artificial Sequence: Synthetic oligonucleotide
cctaaccacagtgtgagcc

SEQ ID NO: 9306 - DNA, 19 bp, Artificial Sequence
  Description of Artificial Sequence: Synthetic oligonucleotide
ccctaaccacagtgtgagc

SEQ ID NO: 9307 - DNA, 19 bp, Artificial Sequence
  Description of Artificial Sequence: Synthetic oligonucleotide
accctaaccacagtgtgag

SEQ ID NO: 9308 - DNA, 19 bp, Artificial Sequence
  Description of Artificial Sequence: Synthetic oligonucleotide
caccctaaccacagtgtga

SEQ ID NO: 9309 - DNA, 19 bp, Artificial Sequence
  Description of Artificial Sequence: Synthetic oligonucleotide
ccaccctaaccacagtgtg

SEQ ID NO: 9310 - DNA, 19 bp, Artificial Sequence
  Description of Artificial Sequence: Synthetic oligonucleotide
cccaccctaaccacagtgt

SEQ ID NO: 9311 - DNA, 19 bp, Artificial Sequence
  Description of Artificial Sequence: Synthetic oligonucleotide
gcccaccctaaccacagtg

SEQ ID NO: 9312 - DNA, 19 bp, Artificial Sequence
  Description of Artificial Sequence: Synthetic oligonucleotide
tgcccaccctaaccacagt

SEQ ID NO: 9313 - DNA, 19 bp, Artificial Sequence
  Description of Artificial Sequence: Synthetic oligonucleotide
gtgcccaccctaaccacag

SEQ ID NO: 9314 - DNA, 19 bp, Artificial Sequence
  Description of Artificial Sequence: Synthetic oligonucleotide
tgtgcccaccctaaccaca

SEQ ID NO: 9315 - DNA, 19 bp, Artificial Sequence
  Description of Artificial Sequence: Synthetic oligonucleotide
atgtgcccaccctaaccac

SEQ ID NO: 9316 - DNA, 19 bp, Artificial Sequence
  Description of Artificial Sequence: Synthetic oligonucleotide
gatgtgcccaccctaacca

SEQ ID NO: 9317 - DNA, 19 bp, Artificial Sequence
  Description of Artificial Sequence: Synthetic oligonucleotide
ggatgtgcccaccctaacc

SEQ ID NO: 9318 - DNA, 19 bp, Artificial Sequence
  Description of Artificial Sequence: Synthetic oligonucleotide
tggatgtgcccaccctaac

SEQ ID NO: 9319 - DNA, 19 bp, Artificial Sequence
  Description of Artificial Sequence: Synthetic oligonucleotide
gtggatgtgcccaccctaa

SEQ ID NO: 9320 - DNA, 19 bp, Artificial Sequence
  Description of Artificial Sequence: Synthetic oligonucleotide
agtggatgtgcccacccta

SEQ ID NO: 9321 - DNA, 19 bp, Artificial Sequence
  Description of Artificial Sequence: Synthetic oligonucleotide
gagtggatgtgcccaccct

SEQ ID NO: 9322 - DNA, 19 bp, Artificial Sequence
  Description of Artificial Sequence: Synthetic oligonucleotide
agagtggatgtgcccaccc

SEQ ID NO: 9323 - DNA, 19 bp, Artificial Sequence
  Description of Artificial Sequence: Synthetic oligonucleotide
cagagtggatgtgcccacc

SEQ ID NO: 9324 - DNA, 19 bp, Artificial Sequence
  Description of Artificial Sequence: Synthetic oligonucleotide
gcagagtggatgtgcccac

SEQ ID NO: 9325 - DNA, 19 bp, Artificial Sequence
  Description of Artificial Sequence: Synthetic oligonucleotide
ggcagagtggatgtgccca

SEQ ID NO: 9326 - DNA, 19 bp, Artificial Sequence
  Description of Artificial Sequence: Synthetic oligonucleotide
tggcagagtggatgtgccc

SEQ ID NO: 9327 - DNA, 19 bp, Artificial Sequence
  Description of Artificial Sequence: Synthetic oligonucleotide
atggcagagtggatgtgcc

SEQ ID NO: 9328 - DNA, 19 bp, Artificial Sequence
  Description of Artificial Sequence: Synthetic oligonucleotide
gatggcagagtggatgtgc

SEQ ID NO: 9329 - DNA, 19 bp, Artificial Sequence
  Description of Artificial Sequence: Synthetic oligonucleotide
agatggcagagtggatgtg

SEQ ID NO: 9330 - DNA, 19 bp, Artificial Sequence
  Description of Artificial Sequence: Synthetic oligonucleotide
aagatggcagagtggatgt

SEQ ID NO: 9331 - DNA, 19 bp, Artificial Sequence
  Description of Artificial Sequence: Synthetic oligonucleotide
aaagatggcagagtggatg

SEQ ID NO: 9332 - DNA, 19 bp, Artificial Sequence
  Description of Artificial Sequence: Synthetic oligonucleotide
taaagatggcagagtggat

SEQ ID NO: 9333 - DNA, 19 bp, Artificial Sequence
  Description of Artificial Sequence: Synthetic oligonucleotide
ttaaagatggcagagtgga

SEQ ID NO: 9334 - DNA, 19 bp, Artificial Sequence
  Description of Artificial Sequence: Synthetic oligonucleotide
gttaaagatggcagagtgg

SEQ ID NO: 9335 - DNA, 19 bp, Artificial Sequence
  Description of Artificial Sequence: Synthetic oligonucleotide
tgttaaagatggcagagtg

SEQ ID NO: 9336 - DNA, 19 bp, Artificial Sequence
  Description of Artificial Sequence: Synthetic oligonucleotide
gtgttaaagatggcagagt

SEQ ID NO: 9337 - DNA, 19 bp, Artificial Sequence
  Description of Artificial Sequence: Synthetic oligonucleotide
tgtgttaaagatggcagag

SEQ ID NO: 9338 - DNA, 19 bp, Artificial Sequence
  Description of Artificial Sequence: Synthetic oligonucleotide
gtgtgttaaagatggcaga

SEQ ID NO: 9339 - DNA, 19 bp, Artificial Sequence
  Description of Artificial Sequence: Synthetic oligonucleotide
acaactatcaacagccggg

SEQ ID NO: 9340 - DNA, 19 bp, Artificial Sequence
  Description of Artificial Sequence: Synthetic oligonucleotide
caactatcaacagccggga

SEQ ID NO: 9341 - DNA, 19 bp, Artificial Sequence
  Description of Artificial Sequence: Synthetic oligonucleotide
aactatcaacagccgggaa

SEQ ID NO: 9342 - DNA, 19 bp, Artificial Sequence
  Description of Artificial Sequence: Synthetic oligonucleotide
actatcaacagccgggaag

SEQ ID NO: 9343 - DNA, 19 bp, Artificial Sequence
  Description of Artificial Sequence: Synthetic oligonucleotide
ctatcaacagccgggaagg

SEQ ID NO: 9344 - DNA, 19 bp, Artificial Sequence
  Description of Artificial Sequence: Synthetic oligonucleotide
tatcaacagccgggaaggc

SEQ ID NO: 9345 - DNA, 19 bp, Artificial Sequence
  Description of Artificial Sequence: Synthetic oligonucleotide
atcaacagccgggaaggct

SEQ ID NO: 9346 - DNA, 19 bp, Artificial Sequence
  Description of Artificial Sequence: Synthetic oligonucleotide
tcaacagccgggaaggctg

SEQ ID NO: 9347 - DNA, 19 bp, Artificial Sequence
  Description of Artificial Sequence: Synthetic oligonucleotide
caacagccgggaaggctga

SEQ ID NO: 9348 - DNA, 19 bp, Artificial Sequence
  Description of Artificial Sequence: Synthetic oligonucleotide
aacagccgggaaggctgag

SEQ ID NO: 9349 - DNA, 19 bp, Artificial Sequence
  Description of Artificial Sequence: Synthetic oligonucleotide
acagccgggaaggctgagc

SEQ ID NO: 9350 - DNA, 19 bp, Artificial Sequence
  Description of Artificial Sequence: Synthetic oligonucleotide
cagccgggaaggctgagcg

SEQ ID NO: 9351 - DNA, 19 bp, Artificial Sequence
  Description of Artificial Sequence: Synthetic oligonucleotide
agccgggaaggctgagcgc

SEQ ID NO: 9352 - DNA, 19 bp, Artificial Sequence
  Description of Artificial Sequence: Synthetic oligonucleotide
gccgggaaggctgagcgcg

SEQ ID NO: 9353 - DNA, 19 bp, Artificial Sequence
  Description of Artificial Sequence: Synthetic oligonucleotide
ccgggaaggctgagcgcgt

SEQ ID NO: 9354 - DNA, 19 bp, Artificial Sequence
  Description of Artificial Sequence: Synthetic oligonucleotide
cgggaaggctgagcgcgtg

SEQ ID NO: 9355 - DNA, 19 bp, Artificial Sequence
  Description of Artificial Sequence: Synthetic oligonucleotide
gggaaggctgagcgcgtgt

SEQ ID NO: 9356 - DNA, 19 bp, Artificial Sequence
  Description of Artificial Sequence: Synthetic oligonucleotide
ggaaggctgagcgcgtgtg

SEQ ID NO: 9357 - DNA, 19 bp, Artificial Sequence
  Description of Artificial Sequence: Synthetic oligonucleotide
gaaggctgagcgcgtgtga

SEQ ID NO: 9358 - DNA, 19 bp, Artificial Sequence
  Description of Artificial Sequence: Synthetic oligonucleotide
aaggctgagcgcgtgtgag

SEQ ID NO: 9359 - DNA, 19 bp, Artificial Sequence
  Description of Artificial Sequence: Synthetic oligonucleotide
aggctgagcgcgtgtgagc

SEQ ID NO: 9360 - DNA, 19 bp, Artificial Sequence
  Description of Artificial Sequence: Synthetic oligonucleotide
ggctgagcgcgtgtgagcg

SEQ ID NO: 9361 - DNA, 19 bp, Artificial Sequence
  Description of Artificial Sequence: Synthetic oligonucleotide
gctgagcgcgtgtgagcgc

SEQ ID NO: 9362 - DNA, 19 bp, Artificial Sequence
  Description of Artificial Sequence: Synthetic oligonucleotide
ctgagcgcgtgtgagcgcc

SEQ ID NO: 9363 - DNA, 19 bp, Artificial Sequence
  Description of Artificial Sequence: Synthetic oligonucleotide
tgagcgcgtgtgagcgccg

SEQ ID NO: 9364 - DNA, 19 bp, Artificial Sequence
  Description of Artificial Sequence: Synthetic oligonucleotide
gagcgcgtgtgagcgccga

SEQ ID NO: 9365 - DNA, 19 bp, Artificial Sequence
  Description of Artificial Sequence: Synthetic oligonucleotide
agcgcgtgtgagcgccgag

SEQ ID NO: 9366 - DNA, 19 bp, Artificial Sequence
  Description of Artificial Sequence: Synthetic oligonucleotide
gcgcgtgtgagcgccgagg

SEQ ID NO: 9367 - DNA, 19 bp, Artificial Sequence
  Description of Artificial Sequence: Synthetic oligonucleotide
cgcgtgtgagcgccgaggg

SEQ ID NO: 9368 - DNA, 19 bp, Artificial Sequence
  Description of Artificial Sequence: Synthetic oligonucleotide
gcgtgtgagcgccgagggg

SEQ ID NO: 9369 - DNA, 19 bp, Artificial Sequence
  Description of Artificial Sequence: Synthetic oligonucleotide
cgtgtgagcgccgaggggg

SEQ ID NO: 9370 - DNA, 19 bp, Artificial Sequence
  Description of Artificial Sequence: Synthetic oligonucleotide
gtgtgagcgccgagggggg

SEQ ID NO: 9371 - DNA, 19 bp, Artificial Sequence
  Description of Artificial Sequence: Synthetic oligonucleotide
tgtgagcgccgaggggggc

SEQ ID NO: 9372 - DNA, 19 bp, Artificial Sequence
  Description of Artificial Sequence: Synthetic oligonucleotide
gtgagcgccgaggggggcg

SEQ ID NO: 9373 - DNA, 19 bp, Artificial Sequence
  Description of Artificial Sequence: Synthetic oligonucleotide
tgagcgccgaggggggcgc

SEQ ID NO: 9374 - DNA, 19 bp, Artificial Sequence
  Description of Artificial Sequence: Synthetic oligonucleotide
gagcgccgaggggggcgca

SEQ ID NO: 9375 - DNA, 19 bp, Artificial Sequence
  Description of Artificial Sequence: Synthetic oligonucleotide
agcgccgaggggggcgcag

SEQ ID NO: 9376 - DNA, 19 bp, Artificial Sequence
  Description of Artificial Sequence: Synthetic oligonucleotide
gcgccgaggggggcgcagg

SEQ ID NO: 9377 - DNA, 19 bp, Artificial Sequence
  Description of Artificial Sequence: Synthetic oligonucleotide
cgccgaggggggcgcagga

SEQ ID NO: 9378 - DNA, 19 bp, Artificial Sequence
  Description of Artificial Sequence: Synthetic oligonucleotide
gccgaggggggcgcaggac

SEQ ID NO: 9379 - DNA, 19 bp, Artificial Sequence
  Description of Artificial Sequence: Synthetic oligonucleotide
ccgaggggggcgcaggacc

SEQ ID NO: 9380 - DNA, 19 bp, Artificial Sequence
  Description of Artificial Sequence: Synthetic oligonucleotide
cgaggggggcgcaggaccc

SEQ ID NO: 9381 - DNA, 19 bp, Artificial Sequence
  Description of Artificial Sequence: Synthetic oligonucleotide
gaggggggcgcaggaccct

SEQ ID NO: 9382 - DNA, 19 bp, Artificial Sequence
  Description of Artificial Sequence: Synthetic oligonucleotide
aggggggcgcaggaccctc

SEQ ID NO: 9383 - DNA, 19 bp, Artificial Sequence
  Description of Artificial Sequence: Synthetic oligonucleotide
ggggggcgcaggaccctcg

SEQ ID NO: 9384 - DNA, 19 bp, Artificial Sequence
  Description of Artificial Sequence: Synthetic oligonucleotide
gggggcgcaggaccctcgc

SEQ ID NO: 9385 - DNA, 19 bp, Artificial Sequence
  Description of Artificial Sequence: Synthetic oligonucleotide
ggggcgcaggaccctcgca

SEQ ID NO: 9386 - DNA, 19 bp, Artificial Sequence
  Description of Artificial Sequence: Synthetic oligonucleotide
gggcgcaggaccctcgcaa

SEQ ID NO: 9387 - DNA, 19 bp, Artificial Sequence
  Description of Artificial Sequence: Synthetic oligonucleotide
ggcgcaggaccctcgcaac

SEQ ID NO: 9388 - DNA, 19 bp, Artificial Sequence
  Description of Artificial Sequence: Synthetic oligonucleotide
gcgcaggaccctcgcaact

SEQ ID NO: 9389 - DNA, 19 bp, Artificial Sequence
  Description of Artificial Sequence: Synthetic oligonucleotide
cgcaggaccctcgcaactt

SEQ ID NO: 9390 - DNA, 19 bp, Artificial Sequence
  Description of Artificial Sequence: Synthetic oligonucleotide
gcaggaccctcgcaacttc

SEQ ID NO: 9391 - DNA, 19 bp, Artificial Sequence
  Description of Artificial Sequence: Synthetic oligonucleotide
caggaccctcgcaacttct

SEQ ID NO: 9392 - DNA, 19 bp, Artificial Sequence
  Description of Artificial Sequence: Synthetic oligonucleotide
aggaccctcgcaacttctt

SEQ ID NO: 9393 - DNA, 19 bp, Artificial Sequence
  Description of Artificial Sequence: Synthetic oligonucleotide
ggaccctcgcaacttcttc

SEQ ID NO: 9394 - DNA, 19 bp, Artificial Sequence
  Description of Artificial Sequence: Synthetic oligonucleotide
gaccctcgcaacttcttcg

SEQ ID NO: 9395 - DNA, 19 bp, Artificial Sequence
  Description of Artificial Sequence: Synthetic oligonucleotide
accctcgcaacttcttcgc

SEQ ID NO: 9396 - DNA, 19 bp, Artificial Sequence
  Description of Artificial Sequence: Synthetic oligonucleotide
ccctcgcaacttcttcgca

SEQ ID NO: 9397 - DNA, 19 bp, Artificial Sequence
  Description of Artificial Sequence: Synthetic oligonucleotide
cctcgcaacttcttcgcag

SEQ ID NO: 9398 - DNA, 19 bp, Artificial Sequence
  Description of Artificial Sequence: Synthetic oligonucleotide
ctcgcaacttcttcgcagg

SEQ ID NO: 9399 - DNA, 19 bp, Artificial Sequence
  Description of Artificial Sequence: Synthetic oligonucleotide
tcgcaacttcttcgcagga

SEQ ID NO: 9400 - DNA, 19 bp, Artificial Sequence
  Description of Artificial Sequence: Synthetic oligonucleotide
cgcaacttcttcgcaggac

SEQ ID NO: 9401 - DNA, 19 bp, Artificial Sequence
  Description of Artificial Sequence: Synthetic oligonucleotide
gcaacttcttcgcaggact

SEQ ID NO: 9402 - DNA, 19 bp, Artificial Sequence
  Description of Artificial Sequence: Synthetic oligonucleotide
caacttcttcgcaggactc

SEQ ID NO: 9403 - DNA, 19 bp, Artificial Sequence
  Description of Artificial Sequence: Synthetic oligonucleotide
aacttcttcgcaggactcc

SEQ ID NO: 9404 - DNA, 19 bp, Artificial Sequence
  Description of Artificial Sequence: Synthetic oligonucleotide
acttcttcgcaggactcca

SEQ ID NO: 9405 - DNA, 19 bp, Artificial Sequence
  Description of Artificial Sequence: Synthetic oligonucleotide
cttcttcgcaggactccag

SEQ ID NO: 9406 - DNA, 19 bp, Artificial Sequence
  Description of Artificial Sequence: Synthetic oligonucleotide
ttcttcgcaggactccagc

SEQ ID NO: 9407 - DNA, 19 bp, Artificial Sequence
  Description of Artificial Sequence: Synthetic oligonucleotide
tcttcgcaggactccagcc

SEQ ID NO: 9408 - DNA, 19 bp, Artificial Sequence
  Description of Artificial Sequence: Synthetic oligonucleotide
cttcgcaggactccagcct

SEQ ID NO: 9409 - DNA, 19 bp, Artificial Sequence
  Description of Artificial Sequence: Synthetic oligonucleotide
ttcgcaggactccagcctg

SEQ ID NO: 9410 - DNA, 19 bp, Artificial Sequence
  Description of Artificial Sequence: Synthetic oligonucleotide
tcgcaggactccagcctgg

SEQ ID NO: 9411 - DNA, 19 bp, Artificial Sequence
  Description of Artificial Sequence: Synthetic oligonucleotide
cgcaggactccagcctggc

SEQ ID NO: 9412 - DNA, 19 bp, Artificial Sequence
  Description of Artificial Sequence: Synthetic oligonucleotide
gcaggactccagcctggcc

SEQ ID NO: 9413 - DNA, 19 bp, Artificial Sequence
  Description of Artificial Sequence: Synthetic oligonucleotide
caggactccagcctggccg

SEQ ID NO: 9414 - DNA, 19 bp, Artificial Sequence
  Description of Artificial Sequence: Synthetic oligonucleotide
aggactccagcctggccgc

SEQ ID NO: 9415 - DNA, 19 bp, Artificial Sequence
  Description of Artificial Sequence: Synthetic oligonucleotide
ggactccagcctggccgcc

SEQ ID NO: 9416 - DNA, 19 bp, Artificial Sequence
  Description of Artificial Sequence: Synthetic oligonucleotide
gactccagcctggccgccg

SEQ ID NO: 9417 - DNA, 19 bp, Artificial Sequence
  Description of Artificial Sequence: Synthetic oligonucleotide
actccagcctggccgccgg

SEQ ID NO: 9418 - DNA, 19 bp, Artificial Sequence
  Description of Artificial Sequence: Synthetic oligonucleotide
ctccagcctggccgccggc

SEQ ID NO: 9419 - DNA, 19 bp, Artificial Sequence
  Description of Artificial Sequence: Synthetic oligonucleotide
tccagcctggccgccggcg

SEQ ID NO: 9420 - DNA, 19 bp, Artificial Sequence
  Description of Artificial Sequence: Synthetic oligonucleotide
ccagcctggccgccggcgc

SEQ ID NO: 9421 - DNA, 19 bp, Artificial Sequence
  Description of Artificial Sequence: Synthetic oligonucleotide
cagcctggccgccggcgcc

SEQ ID NO: 9422 - DNA, 19 bp, Artificial Sequence
  Description of Artificial Sequence: Synthetic oligonucleotide
agcctggccgccggcgccc

SEQ ID NO: 9423 - DNA, 19 bp, Artificial Sequence
  Description of Artificial Sequence: Synthetic oligonucleotide
gcctggccgccggcgcccg

SEQ ID NO: 9424 - DNA, 19 bp, Artificial Sequence
  Description of Artificial Sequence: Synthetic oligonucleotide
cctggccgccggcgcccgc

SEQ ID NO: 9425 - DNA, 19 bp, Artificial Sequence
  Description of Artificial Sequence: Synthetic oligonucleotide
ctggccgccggcgcccgca

SEQ ID NO: 9426 - DNA, 19 bp, Artificial Sequence
  Description of Artificial Sequence: Synthetic oligonucleotide
tggccgccggcgcccgcag

SEQ ID NO: 9427 - DNA, 19 bp, Artificial Sequence
  Description of Artificial Sequence: Synthetic oligonucleotide
ggccgccggcgcccgcagc

SEQ ID NO: 9428 - DNA, 19 bp, Artificial Sequence
  Description of Artificial Sequence: Synthetic oligonucleotide
gccgccggcgcccgcagcc

SEQ ID NO: 9429 - DNA, 19 bp, Artificial Sequence
  Description of Artificial Sequence: Synthetic oligonucleotide
ccgccggcgcccgcagccg

SEQ ID NO: 9430 - DNA, 19 bp, Artificial Sequence
  Description of Artificial Sequence: Synthetic oligonucleotide
cgccggcgcccgcagccgt

SEQ ID NO: 9431 - DNA, 19 bp, Artificial Sequence
  Description of Artificial Sequence: Synthetic oligonucleotide
gccggcgcccgcagccgtc

SEQ ID NO: 9432 - DNA, 19 bp, Artificial Sequence
  Description of Artificial Sequence: Synthetic oligonucleotide
ccggcgcccgcagccgtcc

SEQ ID NO: 9433 - DNA, 19 bp, Artificial Sequence
  Description of Artificial Sequence: Synthetic oligonucleotide
cggcgcccgcagccgtccg

SEQ ID NO: 9434 - DNA, 19 bp, Artificial Sequence
  Description of Artificial Sequence: Synthetic oligonucleotide
ggcgcccgcagccgtccga

SEQ ID NO: 9435 - DNA, 19 bp, Artificial Sequence
  Description of Artificial Sequence: Synthetic oligonucleotide
gcgcccgcagccgtccgag

SEQ ID NO: 9436 - DNA, 19 bp, Artificial Sequence
  Description of Artificial Sequence: Synthetic oligonucleotide
cgcccgcagccgtccgaga

SEQ ID NO: 9437 - DNA, 19 bp, Artificial Sequence
  Description of Artificial Sequence: Synthetic oligonucleotide
gcccgcagccgtccgagag

SEQ ID NO: 9438 - DNA, 19 bp, Artificial Sequence
  Description of Artificial Sequence: Synthetic oligonucleotide
cccgcagccgtccgagagc

SEQ ID NO: 9439 - DNA, 19 bp, Artificial Sequence
  Description of Artificial Sequence: Synthetic oligonucleotide
ccgcagccgtccgagagcc

SEQ ID NO: 9440 - DNA, 19 bp, Artificial Sequence
  Description of Artificial Sequence: Synthetic oligonucleotide
cgcagccgtccgagagccc

SEQ ID NO: 9441 - DNA, 19 bp, Artificial Sequence
  Description of Artificial Sequence: Synthetic oligonucleotide
gcagccgtccgagagccct

SEQ ID NO: 9442 - DNA, 19 bp, Artificial Sequence
  Description of Artificial Sequence: Synthetic oligonucleotide
cagccgtccgagagccctg

SEQ ID NO: 9443 - DNA, 19 bp, Artificial Sequence
  Description of Artificial Sequence: Synthetic oligonucleotide
agccgtccgagagccctgc

SEQ ID NO: 9444 - DNA, 19 bp, Artificial Sequence
  Description of Artificial Sequence: Synthetic oligonucleotide
gccgtccgagagccctgcg

SEQ ID NO: 9445 - DNA, 19 bp, Artificial Sequence
  Description of Artificial Sequence: Synthetic oligonucleotide
ccgtccgagagccctgcgc

SEQ ID NO: 9446 - DNA, 19 bp, Artificial Sequence
  Description of Artificial Sequence: Synthetic oligonucleotide
cgtccgagagccctgcgcc

SEQ ID NO: 9447 - DNA, 19 bp, Artificial Sequence
  Description of Artificial Sequence: Synthetic oligonucleotide
gtccgagagccctgcgccc

SEQ ID NO: 9448 - DNA, 19 bp, Artificial Sequence
  Description of Artificial Sequence: Synthetic oligonucleotide
tccgagagccctgcgcccg

SEQ ID NO: 9449 - DNA, 19 bp, Artificial Sequence
  Description of Artificial Sequence: Synthetic oligonucleotide
ccgagagccctgcgcccgc

SEQ ID NO: 9450 - DNA, 19 bp, Artificial Sequence
  Description of Artificial Sequence: Synthetic oligonucleotide
cgagagccctgcgcccgcg

SEQ ID NO: 9451 - DNA, 19 bp, Artificial Sequence
  Description of Artificial Sequence: Synthetic oligonucleotide
gagagccctgcgcccgcgc

SEQ ID NO: 9452 - DNA, 19 bp, Artificial Sequence
  Description of Artificial Sequence: Synthetic oligonucleotide
agagccctgcgcccgcgcc

SEQ ID NO: 9453 - DNA, 19 bp, Artificial Sequence
  Description of Artificial Sequence: Synthetic oligonucleotide
gagccctgcgcccgcgcct

SEQ ID NO: 9454 - DNA, 19 bp, Artificial Sequence
  Description of Artificial Sequence: Synthetic oligonucleotide
agccctgcgcccgcgcctc

SEQ ID NO: 9455 - DNA, 19 bp, Artificial Sequence
  Description of Artificial Sequence: Synthetic oligonucleotide
gccctgcgcccgcgcctcc

SEQ ID NO: 9456 - DNA, 19 bp, Artificial Sequence
  Description of Artificial Sequence: Synthetic oligonucleotide
ccctgcgcccgcgcctccc

SEQ ID NO: 9457 - DNA, 19 bp, Artificial Sequence
  Description of Artificial Sequence: Synthetic oligonucleotide
cctgcgcccgcgcctcccc

SEQ ID NO: 9458 - DNA, 19 bp, Artificial Sequence
  Description of Artificial Sequence: Synthetic oligonucleotide
ctgcgcccgcgcctcccct

SEQ ID NO: 9459 - DNA, 19 bp, Artificial Sequence
  Description of Artificial Sequence: Synthetic oligonucleotide
tgcgcccgcgcctcccctt

SEQ ID NO: 9460 - DNA, 19 bp, Artificial Sequence
  Description of Artificial Sequence: Synthetic oligonucleotide
gcgcccgcgcctccccttg

SEQ ID NO: 9461 - DNA, 19 bp, Artificial Sequence
  Description of Artificial Sequence: Synthetic oligonucleotide
cgcccgcgcctccccttgc

SEQ ID NO: 9462 - DNA, 19 bp, Artificial Sequence
  Description of Artificial Sequence: Synthetic oligonucleotide
gcccgcgcctccccttgcg

SEQ ID NO: 9463 - DNA, 19 bp, Artificial Sequence
  Description of Artificial Sequence: Synthetic oligonucleotide
cccgcgcctccccttgcgc

SEQ ID NO: 9464 - DNA, 19 bp, Artificial Sequence
  Description of Artificial Sequence: Synthetic oligonucleotide
ccgcgcctccccttgcgca

SEQ ID NO: 9465 - DNA, 19 bp, Artificial Sequence
  Description of Artificial Sequence: Synthetic oligonucleotide
cgcgcctccccttgcgcac

SEQ ID NO: 9466 - DNA, 19 bp, Artificial Sequence
  Description of Artificial Sequence: Synthetic oligonucleotide
gcgcctccccttgcgcacc

SEQ ID NO: 9467 - DNA, 19 bp, Artificial Sequence
  Description of Artificial Sequence: Synthetic oligonucleotide
cgcctccccttgcgcaccg

SEQ ID NO: 9468 - DNA, 19 bp, Artificial Sequence
  Description of Artificial Sequence: Synthetic oligonucleotide
gcctccccttgcgcaccgt

SEQ ID NO: 9469 - DNA, 19 bp, Artificial Sequence
  Description of Artificial Sequence: Synthetic oligonucleotide
cctccccttgcgcaccgtg

SEQ ID NO: 9470 - DNA, 19 bp, Artificial Sequence
  Description of Artificial Sequence: Synthetic oligonucleotide
ctccccttgcgcaccgtgg

SEQ ID NO: 9471 - DNA, 19 bp, Artificial Sequence
  Description of Artificial Sequence: Synthetic oligonucleotide
tccccttgcgcaccgtggc

SEQ ID NO: 9472 - DNA, 19 bp, Artificial Sequence
  Description of Artificial Sequence: Synthetic oligonucleotide
ccccttgcgcaccgtggca

SEQ ID NO: 9473 - DNA, 19 bp, Artificial Sequence
  Description of Artificial Sequence: Synthetic oligonucleotide
cccttgcgcaccgtggcag

SEQ ID NO: 9474 - DNA, 19 bp, Artificial Sequence
  Description of Artificial Sequence: Synthetic oligonucleotide
ccttgcgcaccgtggcagc

SEQ ID NO: 9475 - DNA, 19 bp, Artificial Sequence
  Description of Artificial Sequence: Synthetic oligonucleotide
cttgcgcaccgtggcagcg

SEQ ID NO: 9476 - DNA, 19 bp, Artificial Sequence
  Description of Artificial Sequence: Synthetic oligonucleotide
ttgcgcaccgtggcagcgc

SEQ ID NO: 9477 - DNA, 19 bp, Artificial Sequence
  Description of Artificial Sequence: Synthetic oligonucleotide
tgcgcaccgtggcagcgcc

SEQ ID NO: 9478 - DNA, 19 bp, Artificial Sequence
  Description of Artificial Sequence: Synthetic oligonucleotide
gcgcaccgtggcagcgccc

SEQ ID NO: 9479 - DNA, 19 bp, Artificial Sequence
  Description of Artificial Sequence: Synthetic oligonucleotide
cgcaccgtggcagcgcccg

SEQ ID NO: 9480 - DNA, 19 bp, Artificial Sequence
  Description of Artificial Sequence: Synthetic oligonucleotide
gcaccgtggcagcgcccgg

SEQ ID NO: 9481 - DNA, 19 bp, Artificial Sequence
  Description of Artificial Sequence: Synthetic oligonucleotide
caccgtggcagcgcccggc

SEQ ID NO: 9482 - DNA, 19 bp, Artificial Sequence
  Description of Artificial Sequence: Synthetic oligonucleotide
accgtggcagcgcccggcg

SEQ ID NO: 9483 - DNA, 19 bp, Artificial Sequence
  Description of Artificial Sequence: Synthetic oligonucleotide
ccgtggcagcgcccggcgg

SEQ ID NO: 9484 - DNA, 19 bp, Artificial Sequence
  Description of Artificial Sequence: Synthetic oligonucleotide
cgtggcagcgcccggcggg

SEQ ID NO: 9485 - DNA, 19 bp, Artificial Sequence
  Description of Artificial Sequence: Synthetic oligonucleotide
gtggcagcgcccggcgggc

SEQ ID NO: 9486 - DNA, 19 bp, Artificial Sequence
  Description of Artificial Sequence: Synthetic oligonucleotide
tggcagcgcccggcgggcg

SEQ ID NO: 9487 - DNA, 19 bp, Artificial Sequence
  Description of Artificial Sequence: Synthetic oligonucleotide
ggcagcgcccggcgggcgg

SEQ ID NO: 9488 - DNA, 19 bp, Artificial Sequence
  Description of Artificial Sequence: Synthetic oligonucleotide
gcagcgcccggcgggcggt

SEQ ID NO: 9489 - DNA, 19 bp, Artificial Sequence
  Description of Artificial Sequence: Synthetic oligonucleotide
cagcgcccggcgggcggtc

SEQ ID NO: 9490 - DNA, 19 bp, Artificial Sequence
  Description of Artificial Sequence: Synthetic oligonucleotide
agcgcccggcgggcggtcc

SEQ ID NO: 9491 - DNA, 19 bp, Artificial Sequence
  Description of Artificial Sequence: Synthetic oligonucleotide
gcgcccggcgggcggtcct

SEQ ID NO: 9492 - DNA, 19 bp, Artificial Sequence
  Description of Artificial Sequence: Synthetic oligonucleotide
cgcccggcgggcggtcctg

SEQ ID NO: 9493 - DNA, 19 bp, Artificial Sequence
  Description of Artificial Sequence: Synthetic oligonucleotide
gcccggcgggcggtcctgc

SEQ ID NO: 9494 - DNA, 19 bp, Artificial Sequence
  Description of Artificial Sequence: Synthetic oligonucleotide
cccggcgggcggtcctgcc

SEQ ID NO: 9495 - DNA, 19 bp, Artificial Sequence
  Description of Artificial Sequence: Synthetic oligonucleotide
ccggcgggcggtcctgcca

SEQ ID NO: 9496 - DNA, 19 bp, Artificial Sequence
  Description of Artificial Sequence: Synthetic oligonucleotide
cggcgggcggtcctgccag

SEQ ID NO: 9497 - DNA, 19 bp, Artificial Sequence
  Description of Artificial Sequence: Synthetic oligonucleotide
ggcgggcggtcctgccagc

SEQ ID NO: 9498 - DNA, 19 bp, Artificial Sequence
  Description of Artificial Sequence: Synthetic oligonucleotide
gcgggcggtcctgccagcc

SEQ ID NO: 9499 - DNA, 19 bp, Artificial Sequence
  Description of Artificial Sequence: Synthetic oligonucleotide
cgggcggtcctgccagccc

SEQ ID NO: 9500 - DNA, 19 bp, Artificial Sequence
  Description of Artificial Sequence: Synthetic oligonucleotide
gggcggtcctgccagcccc

SEQ ID NO: 9501 - DNA, 19 bp, Artificial Sequence
  Description of Artificial Sequence: Synthetic oligonucleotide
ggcggtcctgccagccccg

SEQ ID NO: 9502 - DNA, 19 bp, Artificial Sequence
  Description of Artificial Sequence: Synthetic oligonucleotide
gcggtcctgccagccccga

SEQ ID NO: 9503 - DNA, 19 bp, Artificial Sequence
  Description of Artificial Sequence: Synthetic oligonucleotide
cggtcctgccagccccgac

SEQ ID NO: 9504 - DNA, 19 bp, Artificial Sequence
  Description of Artificial Sequence: Synthetic oligonucleotide
ggtcctgccagccccgacg

SEQ ID NO: 9505 - DNA, 19 bp, Artificial Sequence
  Description of Artificial Sequence: Synthetic oligonucleotide
gtcctgccagccccgacgg

SEQ ID NO: 9506 - DNA, 19 bp, Artificial Sequence
  Description of Artificial Sequence: Synthetic oligonucleotide
tcctgccagccccgacggg

SEQ ID NO: 9507 - DNA, 19 bp, Artificial Sequence
  Description of Artificial Sequence: Synthetic oligonucleotide
cctgccagccccgacggga

SEQ ID NO: 9508 - DNA, 19 bp, Artificial Sequence
  Description of Artificial Sequence: Synthetic oligonucleotide
ctgccagccccgacgggat

SEQ ID NO: 9509 - DNA, 19 bp, Artificial Sequence
  Description of Artificial Sequence: Synthetic oligonucleotide
tgccagccccgacgggatg

SEQ ID NO: 9510 - DNA, 19 bp, Artificial Sequence
  Description of Artificial Sequence: Synthetic oligonucleotide
gccagccccgacgggatgc

SEQ ID NO: 9511 - DNA, 19 bp, Artificial Sequence
  Description of Artificial Sequence: Synthetic oligonucleotide
ccagccccgacgggatgcc

SEQ ID NO: 9512 - DNA, 19 bp, Artificial Sequence
  Description of Artificial Sequence: Synthetic oligonucleotide
cagccccgacgggatgccc

SEQ ID NO: 9513 - DNA, 19 bp, Artificial Sequence
  Description of Artificial Sequence: Synthetic oligonucleotide
agccccgacgggatgcccg

SEQ ID NO: 9514 - DNA, 19 bp, Artificial Sequence
  Description of Artificial Sequence: Synthetic oligonucleotide
gccccgacgggatgcccgc

SEQ ID NO: 9515 - DNA, 19 bp, Artificial Sequence
  Description of Artificial Sequence: Synthetic oligonucleotide
ccccgacgggatgcccgca

SEQ ID NO: 9516 - DNA, 19 bp, Artificial Sequence
  Description of Artificial Sequence: Synthetic oligonucleotide
cccgacgggatgcccgcag

SEQ ID NO: 9517 - DNA, 19 bp, Artificial Sequence
  Description of Artificial Sequence: Synthetic oligonucleotide
ccgacgggatgcccgcagc

SEQ ID NO: 9518 - DNA, 19 bp, Artificial Sequence
  Description of Artificial Sequence: Synthetic oligonucleotide
cgacgggatgcccgcagcc

SEQ ID NO: 9519 - DNA, 19 bp, Artificial Sequence
  Description of Artificial Sequence: Synthetic oligonucleotide
gacgggatgcccgcagcca

SEQ ID NO: 9520 - DNA, 19 bp, Artificial Sequence
  Description of Artificial Sequence: Synthetic oligonucleotide
acgggatgcccgcagccat

SEQ ID NO: 9521 - DNA, 19 bp, Artificial Sequence
  Description of Artificial Sequence: Synthetic oligonucleotide
cgggatgcccgcagccatg

SEQ ID NO: 9522 - DNA, 19 bp, Artificial Sequence
  Description of Artificial Sequence: Synthetic oligonucleotide
gggatgcccgcagccatgc

SEQ ID NO: 9523 - DNA, 19 bp, Artificial Sequence
  Description of Artificial Sequence: Synthetic oligonucleotide
ggatgcccgcagccatgct

SEQ ID NO: 9524 - DNA, 19 bp, Artificial Sequence
  Description of Artificial Sequence: Synthetic oligonucleotide
gatgcccgcagccatgctc

SEQ ID NO: 9525 - DNA, 19 bp, Artificial Sequence
  Description of Artificial Sequence: Synthetic oligonucleotide
atgcccgcagccatgctcc

SEQ ID NO: 9526 - DNA, 19 bp, Artificial Sequence
  Description of Artificial Sequence: Synthetic oligonucleotide
tgcccgcagccatgctccc

SEQ ID NO: 9527 - DNA, 19 bp, Artificial Sequence
  Description of Artificial Sequence: Synthetic oligonucleotide
gcccgcagccatgctcccc

SEQ ID NO: 9528 - DNA, 19 bp, Artificial Sequence
  Description of Artificial Sequence: Synthetic oligonucleotide
cccggctgttgatagttgt

SEQ ID NO: 9529 - DNA, 19 bp, Artificial Sequence
  Description of Artificial Sequence: Synthetic oligonucleotide
tcccggctgttgatagttg

SEQ ID NO: 9530 - DNA, 19 bp, Artificial Sequence
  Description of Artificial Sequence: Synthetic oligonucleotide
ttcccggctgttgatagtt

SEQ ID NO: 9531 - DNA, 19 bp, Artificial Sequence
  Description of Artificial Sequence: Synthetic oligonucleotide
cttcccggctgttgatagt

SEQ ID NO: 9532 - DNA, 19 bp, Artificial Sequence
  Description of Artificial Sequence: Synthetic oligonucleotide
ccttcccggctgttgatag

SEQ ID NO: 9533 - DNA, 19 bp, Artificial Sequence
  Description of Artificial Sequence: Synthetic oligonucleotide
gccttcccggctgttgata

SEQ ID NO: 9534 - DNA, 19 bp, Artificial Sequence
  Description of Artificial Sequence: Synthetic oligonucleotide
agccttcccggctgttgat

SEQ ID NO: 9535 - DNA, 19 bp, Artificial Sequence
  Description of Artificial Sequence: Synthetic oligonucleotide
cagccttcccggctgttga

SEQ ID NO: 9536 - DNA, 19 bp, Artificial Sequence
  Description of Artificial Sequence: Synthetic oligonucleotide
tcagccttcccggctgttg

SEQ ID NO: 9537 - DNA, 19 bp, Artificial Sequence
  Description of Artificial Sequence: Synthetic oligonucleotide
ctcagccttcccggctgtt

SEQ ID NO: 9538 - DNA, 19 bp, Artificial Sequence
  Description of Artificial Sequence: Synthetic oligonucleotide
gctcagccttcccggctgt

SEQ ID NO: 9539 - DNA, 19 bp, Artificial Sequence
  Description of Artificial Sequence: Synthetic oligonucleotide
cgctcagccttcccggctg

SEQ ID NO: 9540 - DNA, 19 bp, Artificial Sequence
  Description of Artificial Sequence: Synthetic oligonucleotide
gcgctcagccttcccggct

SEQ ID NO: 9541 - DNA, 19 bp, Artificial Sequence
  Description of Artificial Sequence: Synthetic oligonucleotide
cgcgctcagccttcccggc

SEQ ID NO: 9542 - DNA, 19 bp, Artificial Sequence
  Description of Artificial Sequence: Synthetic oligonucleotide
acgcgctcagccttcccgg

SEQ ID NO: 9543 - DNA, 19 bp, Artificial Sequence
  Description of Artificial Sequence: Synthetic oligonucleotide
cacgcgctcagccttcccg

SEQ ID NO: 9544 - DNA, 19 bp, Artificial Sequence
  Description of Artificial Sequence: Synthetic oligonucleotide
acacgcgctcagccttccc

SEQ ID NO: 9545 - DNA, 19 bp, Artificial Sequence
  Description of Artificial Sequence: Synthetic oligonucleotide
cacacgcgctcagccttcc

SEQ ID NO: 9546 - DNA, 19 bp, Artificial Sequence
  Description of Artificial Sequence: Synthetic oligonucleotide
tcacacgcgctcagccttc

SEQ ID NO: 9547 - DNA, 19 bp, Artificial Sequence
  Description of Artificial Sequence: Synthetic oligonucleotide
ctcacacgcgctcagcctt

SEQ ID NO: 9548 - DNA, 19 bp, Artificial Sequence
  Description of Artificial Sequence: Synthetic oligonucleotide
gctcacacgcgctcagcct

SEQ ID NO: 9549 - DNA, 19 bp, Artificial Sequence
  Description of Artificial Sequence: Synthetic oligonucleotide
cgctcacacgcgctcagcc

SEQ ID NO: 9550 - DNA, 19 bp, Artificial Sequence
  Description of Artificial Sequence: Synthetic oligonucleotide
gcgctcacacgcgctcagc

SEQ ID NO: 9551 - DNA, 19 bp, Artificial Sequence
  Description of Artificial Sequence: Synthetic oligonucleotide
ggcgctcacacgcgctcag

SEQ ID NO: 9552 - DNA, 19 bp, Artificial Sequence
  Description of Artificial Sequence: Synthetic oligonucleotide
cggcgctcacacgcgctca

SEQ ID NO: 9553 - DNA, 19 bp, Artificial Sequence
  Description of Artificial Sequence: Synthetic oligonucleotide
tcggcgctcacacgcgctc

SEQ ID NO: 9554 - DNA, 19 bp, Artificial Sequence
  Description of Artificial Sequence: Synthetic oligonucleotide
ctcggcgctcacacgcgct

SEQ ID NO: 9555 - DNA, 19 bp, Artificial Sequence
  Description of Artificial Sequence: Synthetic oligonucleotide
cctcggcgctcacacgcgc

SEQ ID NO: 9556 - DNA, 19 bp, Artificial Sequence
  Description of Artificial Sequence: Synthetic oligonucleotide
ccctcggcgctcacacgcg

SEQ ID NO: 9557 - DNA, 19 bp, Artificial Sequence
  Description of Artificial Sequence: Synthetic oligonucleotide
cccctcggcgctcacacgc

SEQ ID NO: 9558 - DNA, 19 bp, Artificial Sequence
  Description of Artificial Sequence: Synthetic oligonucleotide
ccccctcggcgctcacacg

SEQ ID NO: 9559 - DNA, 19 bp, Artificial Sequence
  Description of Artificial Sequence: Synthetic oligonucleotide
cccccctcggcgctcacac

SEQ ID NO: 9560 - DNA, 19 bp, Artificial Sequence
  Description of Artificial Sequence: Synthetic oligonucleotide
gcccccctcggcgctcaca

SEQ ID NO: 9561 - DNA, 19 bp, Artificial Sequence
  Description of Artificial Sequence: Synthetic oligonucleotide
cgcccccctcggcgctcac

SEQ ID NO: 9562 - DNA, 19 bp, Artificial Sequence
  Description of Artificial Sequence: Synthetic oligonucleotide
gcgcccccctcggcgctca

SEQ ID NO: 9563 - DNA, 19 bp, Artificial Sequence
  Description of Artificial Sequence: Synthetic oligonucleotide
tgcgcccccctcggcgctc

SEQ ID NO: 9564 - DNA, 19 bp, Artificial Sequence
  Description of Artificial Sequence: Synthetic oligonucleotide
ctgcgcccccctcggcgct

SEQ ID NO: 9565 - DNA, 19 bp, Artificial Sequence
  Description of Artificial Sequence: Synthetic oligonucleotide
cctgcgcccccctcggcgc

SEQ ID NO: 9566 - DNA, 19 bp, Artificial Sequence
  Description of Artificial Sequence: Synthetic oligonucleotide
tcctgcgcccccctcggcg

SEQ ID NO: 9567 - DNA, 19 bp, Artificial Sequence
  Description of Artificial Sequence: Synthetic oligonucleotide
gtcctgcgcccccctcggc

SEQ ID NO: 9568 - DNA, 19 bp, Artificial Sequence
  Description of Artificial Sequence: Synthetic oligonucleotide
ggtcctgcgcccccctcgg

SEQ ID NO: 9569 - DNA, 19 bp, Artificial Sequence
  Description of Artificial Sequence: Synthetic oligonucleotide
gggtcctgcgcccccctcg

SEQ ID NO: 9570 - DNA, 19 bp, Artificial Sequence
  Description of Artificial Sequence: Synthetic oligonucleotide
agggtcctgcgcccccctc

SEQ ID NO: 9571 - DNA, 19 bp, Artificial Sequence
  Description of Artificial Sequence: Synthetic oligonucleotide
gagggtcctgcgcccccct

SEQ ID NO: 9572 - DNA, 19 bp, Artificial Sequence
  Description of Artificial Sequence: Synthetic oligonucleotide
cgagggtcctgcgcccccc

SEQ ID NO: 9573 - DNA, 19 bp, Artificial Sequence
  Description of Artificial Sequence: Synthetic oligonucleotide
gcgagggtcctgcgccccc

SEQ ID NO: 9574 - DNA, 19 bp, Artificial Sequence
  Description of Artificial Sequence: Synthetic oligonucleotide
tgcgagggtcctgcgcccc

SEQ ID NO: 9575 - DNA, 19 bp, Artificial Sequence
  Description of Artificial Sequence: Synthetic oligonucleotide
ttgcgagggtcctgcgccc

SEQ ID NO: 9576 - DNA, 19 bp, Artificial Sequence
  Description of Artificial Sequence: Synthetic oligonucleotide
gttgcgagggtcctgcgcc

SEQ ID NO: 9577 - DNA, 19 bp, Artificial Sequence
  Description of Artificial Sequence: Synthetic oligonucleotide
agttgcgagggtcctgcgc

SEQ ID NO: 9578 - DNA, 19 bp, Artificial Sequence
  Description of Artificial Sequence: Synthetic oligonucleotide
aagttgcgagggtcctgcg

SEQ ID NO: 9579 - DNA, 19 bp, Artificial Sequence
  Description of Artificial Sequence: Synthetic oligonucleotide
gaagttgcgagggtcctgc

SEQ ID NO: 9580 - DNA, 19 bp, Artificial Sequence
  Description of Artificial Sequence: Synthetic oligonucleotide
agaagttgcgagggtcctg

SEQ ID NO: 9581 - DNA, 19 bp, Artificial Sequence
  Description of Artificial Sequence: Synthetic oligonucleotide
aagaagttgcgagggtcct

SEQ ID NO: 9582 - DNA, 19 bp, Artificial Sequence
  Description of Artificial Sequence: Synthetic oligonucleotide
gaagaagttgcgagggtcc

SEQ ID NO: 9583 - DNA, 19 bp, Artificial Sequence
  Description of Artificial Sequence: Synthetic oligonucleotide
cgaagaagttgcgagggtc

SEQ ID NO: 9584 - DNA, 19 bp, Artificial Sequence
  Description of Artificial Sequence: Synthetic oligonucleotide
gcgaagaagttgcgagggt

SEQ ID NO: 9585 - DNA, 19 bp, Artificial Sequence
  Description of Artificial Sequence: Synthetic oligonucleotide
tgcgaagaagttgcgaggg

SEQ ID NO: 9586 - DNA, 19 bp, Artificial Sequence
  Description of Artificial Sequence: Synthetic oligonucleotide
ctgcgaagaagttgcgagg

SEQ ID NO: 9587 - DNA, 19 bp, Artificial Sequence
  Description of Artificial Sequence: Synthetic oligonucleotide
cctgcgaagaagttgcgag

SEQ ID NO: 9588 - DNA, 19 bp, Artificial Sequence
  Description of Artificial Sequence: Synthetic oligonucleotide
tcctgcgaagaagttgcga

SEQ ID NO: 9589 - DNA, 19 bp, Artificial Sequence
  Description of Artificial Sequence: Synthetic oligonucleotide
gtcctgcgaagaagttgcg

SEQ ID NO: 9590 - DNA, 19 bp, Artificial Sequence
  Description of Artificial Sequence: Synthetic oligonucleotide
agtcctgcgaagaagttgc

SEQ ID NO: 9591 - DNA, 19 bp, Artificial Sequence
  Description of Artificial Sequence: Synthetic oligonucleotide
gagtcctgcgaagaagttg

SEQ ID NO: 9592 - DNA, 19 bp, Artificial Sequence
  Description of Artificial Sequence: Synthetic oligonucleotide
ggagtcctgcgaagaagtt

SEQ ID NO: 9593 - DNA, 19 bp, Artificial Sequence
  Description of Artificial Sequence: Synthetic oligonucleotide
tggagtcctgcgaagaagt

SEQ ID NO: 9594 - DNA, 19 bp, Artificial Sequence
  Description of Artificial Sequence: Synthetic oligonucleotide
ctggagtcctgcgaagaag

SEQ ID NO: 9595 - DNA, 19 bp, Artificial Sequence
  Description of Artificial Sequence: Synthetic oligonucleotide
gctggagtcctgcgaagaa

SEQ ID NO: 9596 - DNA, 19 bp, Artificial Sequence
  Description of Artificial Sequence: Synthetic oligonucleotide
ggctggagtcctgcgaaga

SEQ ID NO: 9597 - DNA, 19 bp, Artificial Sequence
  Description of Artificial Sequence: Synthetic oligonucleotide
aggctggagtcctgcgaag

SEQ ID NO: 9598 - DNA, 19 bp, Artificial Sequence
  Description of Artificial Sequence: Synthetic oligonucleotide
caggctggagtcctgcgaa

SEQ ID NO: 9599 - DNA, 19 bp, Artificial Sequence
  Description of Artificial Sequence: Synthetic oligonucleotide
ccaggctggagtcctgcga

SEQ ID NO: 9600 - DNA, 19 bp, Artificial Sequence
  Description of Artificial Sequence: Synthetic oligonucleotide
gccaggctggagtcctgcg

SEQ ID NO: 9601 - DNA, 19 bp, Artificial Sequence
  Description of Artificial Sequence: Synthetic oligonucleotide
ggccaggctggagtcctgc

SEQ ID NO: 9602 - DNA, 19 bp, Artificial Sequence
  Description of Artificial Sequence: Synthetic oligonucleotide
cggccaggctggagtcctg

SEQ ID NO: 9603 - DNA, 19 bp, Artificial Sequence
  Description of Artificial Sequence: Synthetic oligonucleotide
gcggccaggctggagtcct

SEQ ID NO: 9604 - DNA, 19 bp, Artificial Sequence
  Description of Artificial Sequence: Synthetic oligonucleotide
ggcggccaggctggagtcc

SEQ ID NO: 9605 - DNA, 19 bp, Artificial Sequence
  Description of Artificial Sequence: Synthetic oligonucleotide
cggcggccaggctggagtc

SEQ ID NO: 9606 - DNA, 19 bp, Artificial Sequence
  Description of Artificial Sequence: Synthetic oligonucleotide
ccggcggccaggctggagt

SEQ ID NO: 9607 - DNA, 19 bp, Artificial Sequence
  Description of Artificial Sequence: Synthetic oligonucleotide
gccggcggccaggctggag

SEQ ID NO: 9608 - DNA, 19 bp, Artificial Sequence
  Description of Artificial Sequence: Synthetic oligonucleotide
cgccggcggccaggctgga

SEQ ID NO: 9609 - DNA, 19 bp, Artificial Sequence
  Description of Artificial Sequence: Synthetic oligonucleotide
gcgccggcggccaggctgg

SEQ ID NO: 9610 - DNA, 19 bp, Artificial Sequence
  Description of Artificial Sequence: Synthetic oligonucleotide
ggcgccggcggccaggctg

SEQ ID NO: 9611 - DNA, 19 bp, Artificial Sequence
  Description of Artificial Sequence: Synthetic oligonucleotide
gggcgccggcggccaggct

SEQ ID NO: 9612 - DNA, 19 bp, Artificial Sequence
  Description of Artificial Sequence: Synthetic oligonucleotide
cgggcgccggcggccaggc

SEQ ID NO: 9613 - DNA, 19 bp, Artificial Sequence
  Description of Artificial Sequence: Synthetic oligonucleotide
gcgggcgccggcggccagg

SEQ ID NO: 9614 - DNA, 19 bp, Artificial Sequence
  Description of Artificial Sequence: Synthetic oligonucleotide
tgcgggcgccggcggccag

SEQ ID NO: 9615 - DNA, 19 bp, Artificial Sequence
  Description of Artificial Sequence: Synthetic oligonucleotide
ctgcgggcgccggcggcca

SEQ ID NO: 9616 - DNA, 19 bp, Artificial Sequence
  Description of Artificial Sequence: Synthetic oligonucleotide
gctgcgggcgccggcggcc

SEQ ID NO: 9617 - DNA, 19 bp, Artificial Sequence
  Description of Artificial Sequence: Synthetic oligonucleotide
ggctgcgggcgccggcggc

SEQ ID NO: 9618 - DNA, 19 bp, Artificial Sequence
  Description of Artificial Sequence: Synthetic oligonucleotide
cggctgcgggcgccggcgg

SEQ ID NO: 9619 - DNA, 19 bp, Artificial Sequence
  Description of Artificial Sequence: Synthetic oligonucleotide
acggctgcgggcgccggcg

SEQ ID NO: 9620 - DNA, 19 bp, Artificial Sequence
  Description of Artificial Sequence: Synthetic oligonucleotide
gacggctgcgggcgccggc

SEQ ID NO: 9621 - DNA, 19 bp, Artificial Sequence
  Description of Artificial Sequence: Synthetic oligonucleotide
ggacggctgcgggcgccgg

SEQ ID NO: 9622 - DNA, 19 bp, Artificial Sequence
  Description of Artificial Sequence: Synthetic oligonucleotide
cggacggctgcgggcgccg

SEQ ID NO: 9623 - DNA, 19 bp, Artificial Sequence
  Description of Artificial Sequence: Synthetic oligonucleotide
tcggacggctgcgggcgcc

SEQ ID NO: 9624 - DNA, 19 bp, Artificial Sequence
  Description of Artificial Sequence: Synthetic oligonucleotide
ctcggacggctgcgggcgc

SEQ ID NO: 9625 - DNA, 19 bp, Artificial Sequence
  Description of Artificial Sequence: Synthetic oligonucleotide
tctcggacggctgcgggcg

SEQ ID NO: 9626 - DNA, 19 bp, Artificial Sequence
  Description of Artificial Sequence: Synthetic oligonucleotide
ctctcggacggctgcgggc

SEQ ID NO: 9627 - DNA, 19 bp, Artificial Sequence
  Description of Artificial Sequence: Synthetic oligonucleotide
gctctcggacggctgcggg

SEQ ID NO: 9628 - DNA, 19 bp, Artificial Sequence
  Description of Artificial Sequence: Synthetic oligonucleotide
ggctctcggacggctgcgg

SEQ ID NO: 9629 - DNA, 19 bp, Artificial Sequence
  Description of Artificial Sequence: Synthetic oligonucleotide
gggctctcggacggctgcg

SEQ ID NO: 9630 - DNA, 19 bp, Artificial Sequence
  Description of Artificial Sequence: Synthetic oligonucleotide
agggctctcggacggctgc

SEQ ID NO: 9631 - DNA, 19 bp, Artificial Sequence
  Description of Artificial Sequence: Synthetic oligonucleotide
cagggctctcggacggctg

SEQ ID NO: 9632 - DNA, 19 bp, Artificial Sequence
  Description of Artificial Sequence: Synthetic oligonucleotide
gcagggctctcggacggct

SEQ ID NO: 9633 - DNA, 19 bp, Artificial Sequence
  Description of Artificial Sequence: Synthetic oligonucleotide
cgcagggctctcggacggc

SEQ ID NO: 9634 - DNA, 19 bp, Artificial Sequence
  Description of Artificial Sequence: Synthetic oligonucleotide
gcgcagggctctcggacgg

SEQ ID NO: 9635 - DNA, 19 bp, Artificial Sequence
  Description of Artificial Sequence: Synthetic oligonucleotide
ggcgcagggctctcggacg

SEQ ID NO: 9636 - DNA, 19 bp, Artificial Sequence
  Description of Artificial Sequence: Synthetic oligonucleotide
gggcgcagggctctcggac

SEQ ID NO: 9637 - DNA, 19 bp, Artificial Sequence
  Description of Artificial Sequence: Synthetic oligonucleotide
cgggcgcagggctctcgga

SEQ ID NO: 9638 - DNA, 19 bp, Artificial Sequence
  Description of Artificial Sequence: Synthetic oligonucleotide
gcgggcgcagggctctcgg

SEQ ID NO: 9639 - DNA, 19 bp, Artificial Sequence
  Description of Artificial Sequence: Synthetic oligonucleotide
cgcgggcgcagggctctcg

SEQ ID NO: 9640 - DNA, 19 bp, Artificial Sequence
  Description of Artificial Sequence: Synthetic oligonucleotide
gcgcgggcgcagggctctc

SEQ ID NO: 9641 - DNA, 19 bp, Artificial Sequence
  Description of Artificial Sequence: Synthetic oligonucleotide
ggcgcgggcgcagggctct

SEQ ID NO: 9642 - DNA, 19 bp, Artificial Sequence
  Description of Artificial Sequence: Synthetic oligonucleotide
aggcgcgggcgcagggctc

SEQ ID NO: 9643 - DNA, 19 bp, Artificial Sequence
  Description of Artificial Sequence: Synthetic oligonucleotide
gaggcgcgggcgcagggct

SEQ ID NO: 9644 - DNA, 19 bp, Artificial Sequence
  Description of Artificial Sequence: Synthetic oligonucleotide
ggaggcgcgggcgcagggc

SEQ ID NO: 9645 - DNA, 19 bp, Artificial Sequence
  Description of Artificial Sequence: Synthetic oligonucleotide
gggaggcgcgggcgcaggg

SEQ ID NO: 9646 - DNA, 19 bp, Artificial Sequence
  Description of Artificial Sequence: Synthetic oligonucleotide
ggggaggcgcgggcgcagg

SEQ ID NO: 9647 - DNA, 19 bp, Artificial Sequence
  Description of Artificial Sequence: Synthetic oligonucleotide
aggggaggcgcgggcgcag

SEQ ID NO: 9648 - DNA, 19 bp, Artificial Sequence
  Description of Artificial Sequence: Synthetic oligonucleotide
aaggggaggcgcgggcgca

SEQ ID NO: 9649 - DNA, 19 bp, Artificial Sequence
  Description of Artificial Sequence: Synthetic oligonucleotide
caaggggaggcgcgggcgc

SEQ ID NO: 9650 - DNA, 19 bp, Artificial Sequence
  Description of Artificial Sequence: Synthetic oligonucleotide
gcaaggggaggcgcgggcg

SEQ ID NO: 9651 - DNA, 19 bp, Artificial Sequence
  Description of Artificial Sequence: Synthetic oligonucleotide
cgcaaggggaggcgcgggc

SEQ ID NO: 9652 - DNA, 19 bp, Artificial Sequence
  Description of Artificial Sequence: Synthetic oligonucleotide
gcgcaaggggaggcgcggg

SEQ ID NO: 9653 - DNA, 19 bp, Artificial Sequence
  Description of Artificial Sequence: Synthetic oligonucleotide
tgcgcaaggggaggcgcgg

SEQ ID NO: 9654 - DNA, 19 bp, Artificial Sequence
  Description of Artificial Sequence: Synthetic oligonucleotide
gtgcgcaaggggaggcgcg

SEQ ID NO: 9655 - DNA, 19 bp, Artificial Sequence
  Description of Artificial Sequence: Synthetic oligonucleotide
ggtgcgcaaggggaggcgc

SEQ ID NO: 9656 - DNA, 19 bp, Artificial Sequence
  Description of Artificial Sequence: Synthetic oligonucleotide
cggtgcgcaaggggaggcg

SEQ ID NO: 9657 - DNA, 19 bp, Artificial Sequence
  Description of Artificial Sequence: Synthetic oligonucleotide
acggtgcgcaaggggaggc

SEQ ID NO: 9658 - DNA, 19 bp, Artificial Sequence
  Description of Artificial Sequence: Synthetic oligonucleotide
cacggtgcgcaaggggagg

SEQ ID NO: 9659 - DNA, 19 bp, Artificial Sequence
  Description of Artificial Sequence: Synthetic oligonucleotide
ccacggtgcgcaaggggag

SEQ ID NO: 9660 - DNA, 19 bp, Artificial Sequence
  Description of Artificial Sequence: Synthetic oligonucleotide
gccacggtgcgcaagggga

SEQ ID NO: 9661 - DNA, 19 bp, Artificial Sequence
  Description of Artificial Sequence: Synthetic oligonucleotide
tgccacggtgcgcaagggg

SEQ ID NO: 9662 - DNA, 19 bp, Artificial Sequence
  Description of Artificial Sequence: Synthetic oligonucleotide
ctgccacggtgcgcaaggg

SEQ ID NO: 9663 - DNA, 19 bp, Artificial Sequence
  Description of Artificial Sequence: Synthetic oligonucleotide
gctgccacggtgcgcaagg

SEQ ID NO: 9664 - DNA, 19 bp, Artificial Sequence
  Description of Artificial Sequence: Synthetic oligonucleotide
cgctgccacggtgcgcaag

SEQ ID NO: 9665 - DNA, 19 bp, Artificial Sequence
  Description of Artificial Sequence: Synthetic oligonucleotide
gcgctgccacggtgcgcaa

SEQ ID NO: 9666 - DNA, 19 bp, Artificial Sequence
  Description of Artificial Sequence: Synthetic oligonucleotide
ggcgctgccacggtgcgca

SEQ ID NO: 9667 - DNA, 19 bp, Artificial Sequence
  Description of Artificial Sequence: Synthetic oligonucleotide
gggcgctgccacggtgcgc

SEQ ID NO: 9668 - DNA, 19 bp, Artificial Sequence
  Description of Artificial Sequence: Synthetic oligonucleotide
cgggcgctgccacggtgcg

SEQ ID NO: 9669 - DNA, 19 bp, Artificial Sequence
  Description of Artificial Sequence: Synthetic oligonucleotide
ccgggcgctgccacggtgc

SEQ ID NO: 9670 - DNA, 19 bp, Artificial Sequence
  Description of Artificial Sequence: Synthetic oligonucleotide
gccgggcgctgccacggtg

SEQ ID NO: 9671 - DNA, 19 bp, Artificial Sequence
  Description of Artificial Sequence: Synthetic oligonucleotide
cgccgggcgctgccacggt

SEQ ID NO: 9672 - DNA, 19 bp, Artificial Sequence
  Description of Artificial Sequence: Synthetic oligonucleotide
ccgccgggcgctgccacgg

SEQ ID NO: 9673 - DNA, 19 bp, Artificial Sequence
  Description of Artificial Sequence: Synthetic oligonucleotide
cccgccgggcgctgccacg

SEQ ID NO: 9674 - DNA, 19 bp, Artificial Sequence
  Description of Artificial Sequence: Synthetic oligonucleotide
gcccgccgggcgctgccac

SEQ ID NO: 9675 - DNA, 19 bp, Artificial Sequence
  Description of Artificial Sequence: Synthetic oligonucleotide
cgcccgccgggcgctgcca

SEQ ID NO: 9676 - DNA, 19 bp, Artificial Sequence
  Description of Artificial Sequence: Synthetic oligonucleotide
ccgcccgccgggcgctgcc

SEQ ID NO: 9677 - DNA, 19 bp, Artificial Sequence
  Description of Artificial Sequence: Synthetic oligonucleotide
accgcccgccgggcgctgc

SEQ ID NO: 9678 - DNA, 19 bp, Artificial Sequence
  Description of Artificial Sequence: Synthetic oligonucleotide
gaccgcccgccgggcgctg

SEQ ID NO: 9679 - DNA, 19 bp, Artificial Sequence
  Description of Artificial Sequence: Synthetic oligonucleotide
ggaccgcccgccgggcgct

SEQ ID NO: 9680 - DNA, 19 bp, Artificial Sequence
  Description of Artificial Sequence: Synthetic oligonucleotide
aggaccgcccgccgggcgc

SEQ ID NO: 9681 - DNA, 19 bp, Artificial Sequence
  Description of Artificial Sequence: Synthetic oligonucleotide
caggaccgcccgccgggcg

SEQ ID NO: 9682 - DNA, 19 bp, Artificial Sequence
  Description of Artificial Sequence: Synthetic oligonucleotide
gcaggaccgcccgccgggc

SEQ ID NO: 9683 - DNA, 19 bp, Artificial Sequence
  Description of Artificial Sequence: Synthetic oligonucleotide
ggcaggaccgcccgccggg

SEQ ID NO: 9684 - DNA, 19 bp, Artificial Sequence
  Description of Artificial Sequence: Synthetic oligonucleotide
tggcaggaccgcccgccgg

SEQ ID NO: 9685 - DNA, 19 bp, Artificial Sequence
  Description of Artificial Sequence: Synthetic oligonucleotide
ctggcaggaccgcccgccg

SEQ ID NO: 9686 - DNA, 19 bp, Artificial Sequence
  Description of Artificial Sequence: Synthetic oligonucleotide
gctggcaggaccgcccgcc

SEQ ID NO: 9687 - DNA, 19 bp, Artificial Sequence
  Description of Artificial Sequence: Synthetic oligonucleotide
ggctggcaggaccgcccgc

SEQ ID NO: 9688 - DNA, 19 bp, Artificial Sequence
  Description of Artificial Sequence: Synthetic oligonucleotide
gggctggcaggaccgcccg

SEQ ID NO: 9689 - DNA, 19 bp, Artificial Sequence
  Description of Artificial Sequence: Synthetic oligonucleotide
ggggctggcaggaccgccc

SEQ ID NO: 9690 - DNA, 19 bp, Artificial Sequence
  Description of Artificial Sequence: Synthetic oligonucleotide
cggggctggcaggaccgcc

SEQ ID NO: 9691 - DNA, 19 bp, Artificial Sequence
  Description of Artificial Sequence: Synthetic oligonucleotide
tcggggctggcaggaccgc

SEQ ID NO: 9692 - DNA, 19 bp, Artificial Sequence
  Description of Artificial Sequence: Synthetic oligonucleotide
gtcggggctggcaggaccg

SEQ ID NO: 9693 - DNA, 19 bp, Artificial Sequence
  Description of Artificial Sequence: Synthetic oligonucleotide
cgtcggggctggcaggacc

SEQ ID NO: 9694 - DNA, 19 bp, Artificial Sequence
  Description of Artificial Sequence: Synthetic oligonucleotide
ccgtcggggctggcaggac

SEQ ID NO: 9695 - DNA, 19 bp, Artificial Sequence
  Description of Artificial Sequence: Synthetic oligonucleotide
cccgtcggggctggcagga

SEQ ID NO: 9696 - DNA, 19 bp, Artificial Sequence
  Description of Artificial Sequence: Synthetic oligonucleotide
tcccgtcggggctggcagg

SEQ ID NO: 9697 - DNA, 19 bp, Artificial Sequence
  Description of Artificial Sequence: Synthetic oligonucleotide
atcccgtcggggctggcag

SEQ ID NO: 9698 - DNA, 19 bp, Artificial Sequence
  Description of Artificial Sequence: Synthetic oligonucleotide
catcccgtcggggctggca

SEQ ID NO: 9699 - DNA, 19 bp, Artificial Sequence
  Description of Artificial Sequence: Synthetic oligonucleotide
gcatcccgtcggggctggc

SEQ ID NO: 9700 - DNA, 19 bp, Artificial Sequence
  Description of Artificial Sequence: Synthetic oligonucleotide
ggcatcccgtcggggctgg

SEQ ID NO: 9701 - DNA, 19 bp, Artificial Sequence
  Description of Artificial Sequence: Synthetic oligonucleotide
gggcatcccgtcggggctg

SEQ ID NO: 9702 - DNA, 19 bp, Artificial Sequence
  Description of Artificial Sequence: Synthetic oligonucleotide
cgggcatcccgtcggggct

SEQ ID NO: 9703 - DNA, 19 bp, Artificial Sequence
  Description of Artificial Sequence: Synthetic oligonucleotide
gcgggcatcccgtcggggc

SEQ ID NO: 9704 - DNA, 19 bp, Artificial Sequence
  Description of Artificial Sequence: Synthetic oligonucleotide
tgcgggcatcccgtcgggg

SEQ ID NO: 9705 - DNA, 19 bp, Artificial Sequence
  Description of Artificial Sequence: Synthetic oligonucleotide
ctgcgggcatcccgtcggg

SEQ ID NO: 9706 - DNA, 19 bp, Artificial Sequence
  Description of Artificial Sequence: Synthetic oligonucleotide
gctgcgggcatcccgtcgg

SEQ ID NO: 9707 - DNA, 19 bp, Artificial Sequence
  Description of Artificial Sequence: Synthetic oligonucleotide
ggctgcgggcatcccgtcg

SEQ ID NO: 9708 - DNA, 19 bp, Artificial Sequence
  Description of Artificial Sequence: Synthetic oligonucleotide
tggctgcgggcatcccgtc

SEQ ID NO: 9709 - DNA, 19 bp, Artificial Sequence
  Description of Artificial Sequence: Synthetic oligonucleotide
atggctgcgggcatcccgt

SEQ ID NO: 9710 - DNA, 19 bp, Artificial Sequence
  Description of Artificial Sequence: Synthetic oligonucleotide
catggctgcgggcatcccg

SEQ ID NO: 9711 - DNA, 19 bp, Artificial Sequence
  Description of Artificial Sequence: Synthetic oligonucleotide
gcatggctgcgggcatccc

SEQ ID NO: 9712 - DNA, 19 bp, Artificial Sequence
  Description of Artificial Sequence: Synthetic oligonucleotide
agcatggctgcgggcatcc

SEQ ID NO: 9713 - DNA, 19 bp, Artificial Sequence
  Description of Artificial Sequence: Synthetic oligonucleotide
gagcatggctgcgggcatc

SEQ ID NO: 9714 - DNA, 19 bp, Artificial Sequence
  Description of Artificial Sequence: Synthetic oligonucleotide
ggagcatggctgcgggcat

SEQ ID NO: 9715 - DNA, 19 bp, Artificial Sequence
  Description of Artificial Sequence: Synthetic oligonucleotide
gggagcatggctgcgggca

SEQ ID NO: 9716 - DNA, 4 bp, Artificial Sequence
  Description of Artificial Sequence: Synthetic oligonucleotide
gggg

SEQ ID NO: 9717 - DNA, 21 bp, Artificial Sequence
  Description of Artificial Sequence: Synthetic primer
gacccagccctttgttttgac

SEQ ID NO: 9718 - DNA, 22 bp, Artificial Sequence
  Description of Artificial Sequence: Synthetic primer
tgtggacgttgatggtattggt

SEQ ID NO: 9719 - DNA, 23 bp, Artificial Sequence
  Description of Artificial Sequence: Synthetic primer
gccccactcggatacttcttact

SEQ ID NO: 9720 - DNA, 21 bp, Artificial Sequence
  Description of Artificial Sequence: Synthetic primer
gaggaatactgtggcccaaca

SEQ ID NO: 9721 - DNA, 20 bp, Artificial Sequence
  Description of Artificial Sequence: Synthetic primer
ccagagcaggactggaaatg

SEQ ID NO: 9722 - DNA, 22 bp, Artificial Sequence
  Description of Artificial Sequence: Synthetic primer
ctatctgcggatgttccaatgc

SEQ ID NO: 9723 - DNA, 20 bp, Artificial Sequence
  Description of Artificial Sequence: Synthetic primer
ccagagcaggactggaaatg

SEQ ID NO: 9724 - DNA, 19 bp, Artificial Sequence
  Description of Artificial Sequence: Synthetic primer
cgccaaggggacagtgtag

SEQ ID NO: 9725 - protein, 20 aa, Artificial Sequence
  Description of Artificial Sequence: Synthetic peptide
CQRPSDGSSPDRPEKRATSY

SEQ ID NO: 9726 - DNA, 30 bp, Artificial Sequence; identical to SEQ ID NO: 13
  Description of Artificial Sequence: Synthetic primer

SEQ ID NO: 9727 - DNA, 32 bp, Artificial Sequence
  Description of Artificial Sequence: Synthetic primer
aaaagctagcctatctgcggatgttccaatgc

SEQ ID NO: 9728 - DNA, 59 bp, Artificial Sequence; identical to SEQ ID NO: 14
  Description of Artificial Sequence: Synthetic primer

SEQ ID NO: 9729 - DNA, 56 bp, Artificial Sequence
  Description of Artificial Sequence: Synthetic primer
aaaagctagctcacttatcgtcgtcatccttgtaatctctgcggatgttccaatgc

SEQ ID NO: 9730 - DNA, 58 bp, Artificial Sequence; identical to SEQ ID NO: 16
  Description of Artificial Sequence: Synthetic primer

SEQ ID NO: 9731 - DNA, 58 bp, Artificial Sequence; identical to SEQ ID NO: 17
  Description of Artificial Sequence: Synthetic primer

SEQ ID NO: 9732 - DNA, 61 bp, Artificial Sequence
  Description of Artificial Sequence: Synthetic primer
aaaagctagctcaggcgtagtcgggcacgtcgtaggggtagccatacaggctgcttccact

SEQ ID NO: 9733 - DNA, 58 bp, Artificial Sequence
  Description of Artificial Sequence: Synthetic primer
aaaagctagctcacttatcgtcgtcatccttgtaatcgccatacaggctgcttccact

SEQ ID NO: 9734 - DNA, 54 bp, Artificial Sequence
  Description of Artificial Sequence: Synthetic primer
aaaacctaggcttatcgtcgtcatccttgtaatcatgagacctgctgtctggat

SEQ ID NO: 9735 - DNA, 31 bp, Artificial Sequence
  Description of Artificial Sequence: Synthetic primer
aaaagaattcccttcatccagacagcaggtc

SEQ ID NO: 9736 - DNA, 34 bp, Artificial Sequence
  Description of Artificial Sequence: Synthetic primer
aaaactcgagtcagccatacaggctgcttccact

SEQ ID NO: 9737 - DNA, 21 bp, Homo sapiens
  modified_base (11)..(11): a, c, t, g, unknown or other
cgcctcctgcncagatacctg

SEQ ID NO: 9738 - DNA, 21 bp, Homo sapiens
cgcctcctgctcagatacctg

SEQ ID NO: 9739 - DNA, 20 bp, Artificial Sequence
  Description of Artificial Sequence: Synthetic primer
ggggacagagacggactaca

SEQ ID NO: 9740 - DNA, 19 bp, Artificial Sequence
  Description of Artificial Sequence: Synthetic primer
caaggcattcaagtgcatc

SEQ ID NO: 9741 - DNA, 20 bp, Artificial Sequence
  Description of Artificial Sequence: Synthetic primer
ggggacagagacggactaca

SEQ ID NO: 9742 - DNA, 35 bp, Artificial Sequence
  Description of Artificial Sequence: Synthetic primer
ctgccctgcctgccatacagatgaccttgactgtc

SEQ ID NO: 9743 - DNA, 35 bp, Artificial Sequence
  Description of Artificial Sequence: Synthetic primer
aaaactcgagcggcgatggccccactcggatactt

SEQ ID NO: 9744 - DNA, 33 bp, Artificial Sequence
  Description of Artificial Sequence: Synthetic primer
aaaagctagcctacttgcaggtgtgcacgtcgt

SEQ ID NO: 9745 - DNA, 58 bp, Artificial Sequence
  Description of Artificial Sequence: Synthetic primer
aaaagctagctaggcgtagtcgggcacgtcgtaggggtacttgcaggtgtgcacgtcg

SEQ ID NO: 9746 - DNA, 32 bp, Artificial Sequence
  Description of Artificial Sequence: Synthetic primer
atatctcgagcctcgctatggttcgtctgcct

SEQ ID NO: 9747 - DNA, 59 bp, Artificial Sequence
  Description of Artificial Sequence: Synthetic primer
atatgctagctaggcgtagtcgggcacgtcgtaggggtatctcagccgatcctggggac

SEQ ID NO: 9748 - DNA, 28 bp, Artificial Sequence
  Description of Artificial Sequence: Synthetic primer
aaaagaattccggacaacatggaggcag

SEQ ID NO: 9749 - DNA, 60 bp, Artificial Sequence
  Description of Artificial Sequence: Synthetic primer
aaaagctagctacttatcgtcgtcatccttgtaatcgctgtgggccgggctgtcgtctga

SEQ ID NO: 9750 - protein, 26 aa, Homo sapiens
MSWPRRLLLRYLFPALLLHGLGEGSA

SEQ ID NO: 9751 - protein, 26 aa, Equus caballus
MSCLCRLLLTYLFPALLLHGLGEGSA

SEQ ID NO: 9752 - protein, 26 aa, Canis familiaris
MSGPSRLLLAYLSAALLLHGLGEGSA

SEQ ID NO: 9753 - protein, 26 aa, Mus musculus
MSRVRRLLLGYLFPALLLHGLGEGSA

SEQ ID NO: 9754 - protein, 26 aa, Myotis lucifugus
MSCPCRLLLTYLFPALLLHGLGEGSA

SEQ ID NO: 9755 - protein, 26 aa, Gallus gallus
MFVPYGSLMRYLFPALLLHGLGEGSA

SEQ ID NO: 9756 - protein, 26 aa, Pelodiscus sinensis
MSLPCCGRVRYLLLALLLHGLGEGSA

SEQ ID NO: 9757 - protein, 28 aa, Xenopus laevis
MGIPCFYSSLISCLFSIITLVDVGQSSA

SEQ ID NO: 9758 - DNA, 45 bp, Homo sapiens
  modified_base (26)..(26): a, c, t, g, unknown or other
atgtcctggccgcgccgcctcctgcncagatacctgttcccggcc

SEQ ID NO: 9759 - protein, 514 aa, Homo sapiens; identical to SEQ ID NO: 1

SEQ ID NO: 9760 - protein, 515 aa, Equus caballus
MSCLCRLLLTYLFPALLLHGLGEGSALLHPDSRSHPRSLEKNAWRAFKESQCHHMLKHLHNGARITVQMPPAIEGHWVSTGCEVRSGPEFLTRSYRFYHNNTFKAYQFYYGGNRCTSPTYTLVIRGKIRLRQASWIIRGGTEADYQLHHVQVICHTEAVAERLGQLVNHTCPGFVPTGGAWVRDVPYDLWREENGCECTRAVNFAMHELQLIRVEKQHLQHNLDHLVEELFLGDIHTDASQRVFYRPSSYQPPLQNAKNHDHACIACRIIHRSDEHRPPLLPPKADLTVGLHGEWVSQRCEVRPEVLFLTRHFIFHDNNNTWEGHYYHYSDPVCKHPTFTIYAKGRYSRGVHSSRVMGGTEFVFKVTHMKVTPMDAATASLLNVFNGNECGAEGSWQVGVQQDVTHTNGCVALGIKLPHTEYEIFKMEQDARGRYLLFNGQRPSDGSSPDRPEKRATSYQMPLVQCASSAPRAEDFSDDHRAHPSGSHAPRRSACPLLFAALSCLLTLPPWNLLR

SEQ ID NO: 9761 - protein, 515 aa, Canis familiaris
MSGPSRLLLAYLSAALLLHGLGEGSALLHPDSRSHPRSLEKSAWRAFKESQCHHMLKHLHNGARITVQMPPAIEGHWVSTGCEVRSGPEFITRSYRFYHNNTFKAYQFYYGGNRCTSPTYTLVIRGKVRLRQASWIIRGGTEADYQLHNVQVVCHTEAVAERLSQRVNRTCPGFVPAGGPWLQDVPYDLWRAENGCECTKAVNFAMHELQLIRVEKQYLQHNLDRLVEELFLGDIHTDASQRMFYRPSSYQPPLQNAKNHDHACIACRIIHRSDEHRPPLLPPKADLTVGLHGEWVSQRCEVRPEVLFLTRHFIFHDNNNTWEGHYYHYSDPVCKHPTFTIYAKGRYSRGVHSSRVMGGTEFVFKVNHMKVTPMDAATASLLNVFNGNECGAEGSWQVGVQQDVTHTNGCVALGIKLPHTEYEIFKMEQDARGRYLLFNGQRPSDGSSPDRPEKRATSYQMPLVQCASSVPRAEDFSENYRGHQYGSWAPGRSACPLLLAVLPGLLTLLHWNVLR

SEQ ID NO: 9762 - protein, 514 aa, Mus musculus; identical to SEQ ID NO: 3

SEQ ID NO: 9763 - protein, 517 aa, Myotis lucifugus
MSCPCRLLLTYLFPALLLHGLGEGSALLHPDSRSHPRSLEKSAWRAFKESQCHHMLKHLHNGARITVQMPPAIEGHWVSTGCEVRSGPEFITRSYRFYHNNTFKAYQFYYGGNRCTSPTYTLIIRGKIRLRQASWIIRGGTEADYQLHSVQVISHTEAVAERLSQLVNRTCPGFVPAGGAWVQDVPYDLLQEEDGCECTRAVNFAMHELQLLRVEKQYLQHHLDRLVEELFLGDIHTDAAQRTFYRPSSYQPPLQNAKNHDHACIACRIIHRSDEHHPPLLPPKADLTVGLHGEWVSQRCEVRPEVLFLTRHFIFHDNNNTWEGHYYHYSDPVCKHPTFTIYAKGRYSRGVHSSRVMGGTEFVFKVNHMKVTPMDAATTSLLNVFNGNECGAEGSWQVGVQQDVTHTNGCVALGIKLPHTEYEIFKMEQDARGRYLLFNGQRPSDGSSPDRPEKRATSYQMPLVQCASSVSRPEDFSFSEDHRAQQYRSRAPGRSACPRRLAALACLLTLLHWNSLR

SEQ ID NO: 9764 - protein, 515 aa, Gallus gallus
MFVPYGSLMRYLFPALLLHGLGEGSALLHPDSRSHPRSLEKSAWRAFKESQCHHMLKHLHNGARITVQMPPNIEGHWVSTGCEVRAGPEFITRSYRFYHNNTFKAYQFYYGGNRCTNPIYTLVIRGKIRLRQASWIIRGGTEADYQLRNIQIISHNEAVAKKLSELVNNTCPGFIPEDSPWEQDVSYDLLREENGCECTKALNFAMHELQLIRVEKQYLHHNLDHLVEELFLGDIHTDATQRRYYRPSSYQPPLQNAKNHDRTCIACRIIYRSDEHHPPILPPKADLTIGLHGEWVSQRCEVRPEVLFLTRHFIFHDNNNTWEGHYYHYSDPICKHPTFTIYAKGRYSRGVHSAKVMGGTEFVFKVNHMKVTPMDVSTASLLNVFNGNECGAQGSWQVGVQQDVTHTNGCIALGIRLPHTEYEIFKMEQDARGRYLLYNGQRPSDGSSPDRPEKRATSYQMPLIQCASSVPRSEESPEENKIRLYSSRAPAKHPSASALALVLFICTVSYWDILS

SEQ ID NO: 9765 - protein, 515 aa, Pelodiscus sinensis
MSLPCCGRVRYLLLALLLHGLGEGSALLHPDSRSHPRSLEKSAWRAFKESQCHHMLKHLHNGARITVQMPPSIEGHWVSTGCEVRSGPEFITRSYRFYHNNTFKAYQFYYGGNRCTNPTYTLVIRGKIRLRQASWIIRGGTEADYQLHNVQIISHSEAVAEKLSQLVNRTCPGFVPGNSPWEQDVSYNLWREENGCECTRALNFAMHELQLIRVEKQYLHHNLDHLVEELFLGDIHTDATQRMYYRPSSYQPPLQNAKNHDHSCIACRIIYRSDEHHPPILPPKADLTIGLHGEWVSQRCEVRPEVLFLTRHFIFHDNNNTWEGHYYHYSDPICKHPTFTIYAKGRYSRGVHSSKVMGGTEFVFKVNHMKVTPMDIATASLLNVFNGNECGAEGSWQVGVQQDVTHTNGCVALGIRLPHTEYEIFKMEQNARGSYLLYNGQRPSDGSSPDRPEKRATSYQMPLVQCASSAPRPEESAEENKIGRYSSRAPKKDSSVFMLTLMLFICTGSHWNIHS

SEQ ID NO: 9766 - protein, 494 aa, Xenopus tropicalis
IGVGQSSALTLPDNRLHPQSLEKNPWREFQCQHMLKHLHNGARVTVQMPPNIEGHWVSMGCEVRSGPEFITRSYRFYNNNTFKAYQYYYGNNHCTNPTYTLVTRGKIRLRQASWIIRGGTEADYQLHNVQVIPHSESVAEKLTWLINHTCPGFVPGDMPWEPGISYDLWREESGFKCTKALNFAMHELQLIRVEKQYMHHNLDHLVEELFLGDIHTDPTQRMYYRPSSYQPPLQNAKNLNQNCVACRTILHSDEYHPILPAKADLPVGLHGEWVSQRCEVRPEVLFLTRHFIFNDSNHTWEGFYYHYSDPICKHPSFTIYAKGRYSRGVYSSKVMGGTEFVFKVSHMKVTPMDFATASLLNVFNGDECGAEGSWKVGVEQDVTHTNGCVALGIKLPHTEYELFRMEQDNRGRYLLYNGQRPSDGSSPDRPEKRATSYQVPLVQCTSSSLNPEGAHDSQQKSQSRNSAAGHIFLYLFSNIFLLFICTLLHLEILS

SEQ ID NO: 9767 - protein, 416 aa, Danio rerio
KDTECVQMLKHLHSGARITVQMPPDIQGHWVSTSCEVRPGPEFITRSYRFLHNSSFSALQFYYSDVHCSSPTHTLLVRGRLRLRQASWIVRGGTEADYQIQSTRVVFHSESAAAALGLQLERGCRSISRSWRLNMSYELWSEEKDSECTAQINFSMHELQLLRLEKQHLEPALEELYLGDIHTQAEHRLTYRPSSYQPALHNARNHDGRCLVCRMVSRSDEFHPPVLPVLPVLPVVLQGQWASRRCEVRPEVQFLTRHFIFHDSNSSWEGHYYHYSDPACRHPTFSITARGAYSRGAESARISGATEYIFTVQQVCVLPLDVSTVSLLNLSPGAQCGVRGSWRLGEQQDVTATQGCAALGIRLPHTEFEIFRSQRLQDGRLLLFNGQRPSDGSSPDRPERRPSSFQQPLMQCTEQS

SEQ ID NO: 9768 - protein, 357 aa, Ciona intestinalis
MKKHHRLLVYSSQTNCDCTDELDFYLGELEVMKVVRVKDYRPPFKTVTQLFAGDVKTKIDNRRYYRSNTFQAPLERLGIMSSNIEMQIGRFFPPNLHRTLISPNSQQFILHGNWLSVRCELRPHSSFLTRHLFFPRNGNVWSGVYRYYVDDQCREPYYTLRAHGRYDRTAINPTNGDADYVFDARRMFITSHSVNLTSLLNDAKRGSLKLETHVEYDVPETEGIPLIDLSLPRREYDHIMMRRIDGNLLLFTGRRPNDGTIPDSADKRTTSYQDELLRCRSKCAFDDLRDSTFLCGISATELPGSIETTVIPNKEKHQHDFVAMVYQEATTSSAKKNMHSLTFILSLLCIIAILKYE

SEQ ID NO: 9769 - protein, 70 aa, Homo sapiens
MSWPRRLLLRYLFPALLLHGLGEGSALLHPDSRSHPRSLEKSAWRAFKESQCHHMLKHLHNGARITVQMP

SEQ ID NO: 9770 - protein, 70 aa, Homo sapiens
MSWPRRLLRRYLFPALLLHGLGEGSALLHPDSRSHPRSLEKSAWRAFKESQCHHMLKHLHNGARITVQMP

SEQ ID NO: 9771 - protein, 7 aa, Homo sapiens
  MOD_RES (4)..(4): Leu or Arg
RLLXRYL

SEQ ID NO: 9772 - protein, 7 aa, Homo sapiens
RLLLRYL

SEQ ID NO: 9773 - protein, 15 aa, Homo sapiens
  MOD_RES (9)..(9): Leu or Arg
MSWPRRLLXRYLFPA
